United States Patent Application Publication US 2026/0258423 A1 - sequence listing, part 71

SEQ ID NO: 301568 - DNA, 83257441 bp, Homo sapiens (residues 68,313,825-70,448,631 of 83,257,441)
  source 1..83257441: mol_type = genomic DNA
cctgccactacgcacggctgatttttgtatttttagtagagacggagttttgccatgttggccaggctggtcttgaactcctgacctcaagtgattcacctgccttggcctcccaaagtgctgggattacaagcgtgagccaccatgcctggcctacatatctctttttactccgcttctaacgcagtctataatgtagtaggtggtcagtcagtatctgtcgcattaaagactaaatgtcatgcttaagagggcaggagccagacagtttgagctcaaatcccagctctgccacttcctatctgtggccccgggcaaactgcatcatcccctggagttttgctttcctcttctgtaagtggggacaatgatagcacctctacctcacaggatgttgtgagggttaaattaagtaatctgggccgggcacagtggctcacacctgtaatcccagcactttgggaggccgaggcagatggatcacctgaggtcaggagtttgagaccagcctgaccaacaagaagaaaccccatctctactaaaaatacaaaagtagccaggcgtggcggcacatgcttgtaatcccagctactcgggaggctgaggcgggagaatcatttgaacccgggaggcggaagttgcagtgagctgagattgcgccattgtactccagcctgggcaacagagcaagactccatctcaaaaaaaaaaaaaaaaaaaattaagtaatctgtaaaccaggtgtggtgttgcacatctgtggtcccagctactccagaggctgaagcacacggatcccttaatgccaggagttcaaggctgcagtgagctatgatcatgccattgtactccagcctggacaacagagtgtctcataaaaaaaataaaaaataaaaaattaagtaatctgtgtaatcagttagcatagagcctagcatacaatagatagggttctatgttagctatggttatttttgttattgttactagaaatgtccaaatggaatgtcagtgtgaattggctaatctgcatgataaaaggtccagtgacaaaacttggaaggatgaggtggagttccagtgacaaattcctgttaatccctatgctggctgtgcattggggccaacacctttatttgaatcaacacaacagctgcaacaatcactaacccttaccaagctcttgcaaggtgccaggctctaggcattaccctggctaattcttggtaccaccctacttttctcttatatctcagatgaggaaattgaggttaagtaacacgcccagagttggtgagtggccaagccaatattcaaactcagatttcctcattctagagccttattctttcagggctgggcagaactggggaatcagcaaagagaatccatcaagatttggccagctttcccatatggctgtcaaagagcaggaggccaggcgtggtggttcacatctgtaattccagtactttgggagatcgaggcggaaggattgcttgagctcaggagtttgagagcagcctgggcaacatagcaagacttcatctctacaaaaaaatcaataaattagctgggcgtggtcctacctactccggaggcggagtcaggaggattgcttgagcccaggaggttgaggccacagtgagctatgatcgtgtcactgcactccagcctgggtgatggagtgaaatcctgtctcaaaaaaaaaaggagattggaatctcatcattttttttctccctttggtgctaatgaaggatttttgtgctgtccaagcataagaggcaacctgagaaatgggattgtatttagttatttattttaagatgaagtcttgctctatcgcctaggctggagtgcagtggcgcgatcttggctcactataacctctgcctcccaggttcaagtgattctcctgccttaacctctcgagtagctgggactacaagtgtgtgccaccatacctggctaatttttgtatttttagtagagacagcatttcaccatgttggccaggctgatcttgaactcgacctcaggtgatccacctgcctcggcctcccaaagtgctgggattacaaagtgcgtgggtggcacccaggcagaaatgggatttagatgtcagtcatcaaaatggttgatgcaaccatcgttcaggaggctcacccagccagggatgtgtgatggctgcagtttcaggtgcctgcaatcttatcctgcctactccagcttcatctccaaccctctcctcatgttcctcacattgcacatgtttctgttccttgaacatatgcttttccctgcctcagggcctttgcactggctgttgcctcttattggcgaggtctctcctcaggcttcaagcagctgatcgcttctcatccttctggcctccactcaaataccatgtcctcagagaggcctttcctgaccgtgctctccaacattgccttcctaccccatgcacatctcctacccattctcctgttctgtttccatgacctgtatcactgttgaaatgatcttctttgtttacttctttgttgcctgtctctcccactggaatattgcctccttacagcagcctccttatctgtcttatttatgtcttcagtggctaaaacaatgcctggcacatggtaggtgctcaaacaataattgttcacgtacttggattcctggatctaaacttctaggtgtgcacacatgggttgacccgagcatgagagctggaactagactgccttggtctgttacttgctagctctgggacactgtgctagttattaaaccttgctggaccttagtatgcttatctctgcaatgggaaaataatggcacctacatcacagggctatggtgaggaggaaataagttaggtcatataaggcagcaaaagggtccctggcatgtattggtgcttgatgggtgctagctcttatgattccctatgacaccggccctgctcccctgttcgtcacaattccctcctctggctggagggtgaggcctgttttctcagcgtctgttccaaaagcaccttgctctatctattcccagactctcacccttccccaggttgagctgtaggactcatctggcttcttagaatctgcttgtttcttctcattcctagaccaaatccccaagtcaacacctaaaggtctcagtaacatttcccttttagtttgtggccagcgcacacgattcgttttttgtttgtttttaacctggttgcaggagatgtgatttgcccatttttgcacagaaagggcaccatccgtaccacaattatgatgtcgttatttgttaaaggaagaaaggaatctgggggaagaaaagcagaatctttcggtgacttcatattttggtatcccttttcagacttctaaactctatttacatggagataaaatagggattatggcctaaaatcccacagccttaagcccatttacagtagcccaggtcaaagagcattcatgtcaccatatccctttgggagaaactgaggccgagagagacgaagtgtttttactgttataatcagctctctgccatgtgggggtcgattatgtggtttgtgggtttgctagctcaaagattgactacatgaaaaataatgatgaactgttttgtttttttttttttgtatgtgaaaaacccaaagctactgcaaatcagcaaacatctctttatcagagggcgttgtcgtttagggcccccagtgttgagagattgctcatgtatgcaccgcaaggccccaagtcccctcgcacatgtcagtaggttaagcagccaacctattttgccgttgaccttgtgggatgtcattttgccaatgtcctttgtagatctgagctgggctgtgctgttgaacacttatcagtttaaaaatgataagatagccagaagataattgaaatgaaatttaaatgaaaatgtcagggacttagtaatcaactaaaacttaaaaatgttaagcaattggccaggcgcagcagctcatgcctgtaatcccagcactttgggaggccaaggccggtggatcacctgaggtcaggagttcaagaccagcctggccaatgtggtgaaaccccgtctctactaaaaatacaaaaattagccgggcgtggtggcgggtgcctgtaatcccagctactcgggaggctgaggcaggagaatctcttgaacccgggaggtggaggttgcagtgagctgagattgtgcctttgcactccagactgggcgacaagagcgagactctgtcttggaaaaaaaaaaaaaaatcaagtaaaacaggagatgaaagcaacttgcattacaataggggacagaggatgaattgctcatgatttaaaaaagagaagaggaccaatgcattctgttggcatcatttccagctcttcatgcagtctgaaattagttaagataactctgagagctcggtgaataaccctgatgatacaacactagtttggttcttgctggcagcacatctcagacccagggaaagccagtgctggtttcacctgtgataaacaagtgacattatttcttgaaaattctcaggctgggaagtgccttgcatatgactcctggctgggtggctggattcaggcaatggcctaggatttctgaatggggatttgagctcctgggcagtaatgactcacaggtctcttgggagagagacagagaatgcccagtgatcgtgagagagaggtggccacaggcagcgaagcccagatacttcccatttgcttgaactgtctgccaggctgactcagaggtgcaggtgacagcacactgtaatcatgtttacttatgtacgttgatttgcaatatgttaactttgcgccttgatctcatttcttctctgctttcccccttctctacccctggtttaattttgagtcaagtcaatgctgctgctgctaggagttacgggcagtggcttagctcggaatcaaagatcaatatttgccacaggaaggtcaggggctcccagggacttgaggctgtttctaaaacgggcctcagtgagcaatgaattgagctgtcaatttagttgaacacttggcttgatttgtgttctcagaattggctttttgcaagagttcatgcaccctgttacctctcagacctctttttctcagccaccctgctgccttggggatttggcagtaacctaatggaagatgcgaaccaggttggcagtcacactgcaggggattgtgatgaggtcttgatatctggtggacagtatggggacgagggcagaaaggacagtctaaacaagaccaatattagggagagcaggccgcttcctctttcatgtaattccttttcagctgtattcctaaccctgacagtaactcagattcagggttgggaggaccctcactggagagaaatcctcttgtcctctgaccttcaccattatcccctagaggccagctttgggaggtcccatcctgacttctctttgtaagctctcggcatggtgggacaggcgactttatgtttttgcacttgagtaaataggtcaaatagaatcaaaatcatgtcatgcccacctttcaactggggccaggtaagtgctgaacaaaagggacttcaggtttttacctcatggctctgtttgatagatggggacaggcaggaacacaatgacctagatggtagccaatcttagagaaaagaaaaggaactgaaatattaaccagtggggccttggtgccagcctgcttaaccaactgcaagctcaaagtagcctgtccaattgctattaatagttcctcttttaagcctcccaaatacagtcattcaacagtgaatctctacgaagaggaggacgtgagacaactgctgggagaccctagccagctctgcccttaagggaccgatggcctgatggcaaataaagacaagaaaaccagcctttagaatgcaggagggtagtgtgctgtgagagtggagactcctgccatatctcctactccttttgcttttataacctgaggtagatgtatctgaattgacagcttaggggatagaactagcatatcacttatagattggtctcagtcaagaaagagaaaggccccttgctgggcttctcaccttttaggtgataaagcttgcagtgaggaatcctgttaaagatagtgccgtggctgggtgcggtggctgacgcctgtaatccaaacactttgggaggccaaggtgggcagactacctgagcccaggagttcgagaccagcctgggcaacacggtgaaatcccatctctactaaaatgcaaaagaaattagtcgggcgtgatggcgtgcgcctgtagtcctagctactcaggaggctgagacaggcgaatcgcttagaacctgggagttggaggttgcagtgagccgagatcgtgccactgcactctggcctaggtgacagagcaagactccgtcttaaaaaaaaaaaaaagatagtgccgtggggctacaggaagagaaaagtcatttctctagagcaaagtcaagaggtcatgagtaaagattatctgttaagacttgaatgctgagacttaaaatgaagggagaggagagtgttgtaggcagaagggaaggcaagagaaaagacccagacctgattcctaggatctccctcggggcactgtcccaggtgctgggaacacagctgtgatccagacaaccaaaagccctcactctccggggggtgttgcattctagcagttgagtatggcagggctgggagtgtgagactggatggagggactgggcatctggtacagtgtgtcatatacatgtttacaggattggacatgatcctgcaagctgtggggatcctgaatgactgaagtcatccacctacatttgagaatttgagatgggattttccagcttaccaggatggcccacctgggtggctggaagggcgggggtcacgttgcagtgatctccaggatggcttgactcagaattgtggcaatggagagagatgtcagattcaggaggcttatagatgcctatgtgtatgtcgcattgtcgtataccttgtgtgtgtgcttccttgaatgtgaatgtgcatatatatatgagactgtgaaaaggaaaggagaaatttgccaaggaccataaccaagctcagctgccaggaatcctttctggaaaagaacaagaggctggatgtggtgacgtgcggtggctacttaggaggccacccaggaggctgagacaggaggatcgcttgagcccaggaatttgaggctgcagtgcactatccttgctcctgtaaatagtcactgcactccagcctggacaacatagcaagaccccatctcaaaaaaaggagaaagaaacaaaaagaaaaagagtataaatggattaatgaatgaatgagtagacgaaaggcaccaagttcactatttgctgccacatttgcttgtagcttacaaagggcctgcgtatccatgatctcaatgatctcacttgacaaccttctgaggaataagtcagctgtgttcccatttaacagaaggcaatgtggaggctgggctgagctggttctctgagttttatttcagctactttccagttcccatctcccaaccctgtccctttacacacaaaggccgcagcaaaagattttaaaaacctattttcacgtccatgcctttaaattatgaatggaacaaggacagtttttattccagtcagagttgccacagaacaccccatcatctattttaaattccttgtaaatgaaggctggacacgcttaactttgcaacgttatgtctctccggggcttttgtggcagcctttccagtgctagccttccctgattctaatacacataatttatgcaatggcaagttgctttggtttctgtctggctgtgtcttaatttgcgttgattttcttgttaacaggctgctgtaatgtctggctctgtatttccagctttgctttacaatgtattttcagactttaattaggacccctgatgatgaactggcctgagcctgcccagatagacttgggaggaaagaaagctttccaaataacaaggtcattttattgcttattaattagtccaactaaatggagacagtggccaggagggggaaaaaaggtgacgtgcaggccagttcataaagctgcatttttgggggtgggtacagcgtctccaaagaattgcaaataaaggaaacgagattgtttctgagagttaagctatgaactttaacacactgtggggaaggaattgagccctgaaagcatccgcttaagtgattacatgaagaatgaactgacatgttttttccaatcaaaccacctgagtttctctaagttttgtttgttcaccagatattgctggggcagccctgccccaccaaggtgctgtgcttggggctggagttgcaactctaagccccatctcatgaaacctacacccggcaaaggaactcaaaactgcatcccgctgtagaaatgtacgatagctggccgggcgcggtggctcatgcctataatcccagcactctgggaggctgaggcaggcggatcacaaggtcaagagatcgagaccatcctggccaaccccatctctactaaaaatacaaaaattagctgggcatggtgttgcgtgcctgtagtcccagctactcaggaggctgaggcaggagaattgcttgaacctgggaggcggaggttgcagtgcgccaagattgtgccactgcactccagcctggcgatagagtgagactccgtctcaaaaaaataaaataaaaaaaaattaaaaaaaaaagaaattaagatagctgttcccaagatgaggacgttaacaagcccacggggagattacatttagggccactgttaaaattgggcaagcagggataacattcaggcagtgtgtttttggcactgaccagccatattagtcagcttgggttgctgtaacaaatacaacagactgtatggcttaaacaataaatgtttatttctcacagttctggaggctaaagtccaacatcagggtactagcatggtcaggttttggtgagggctctttcctggcttgcagacggcccccttcttgctgtattctcacaaggagaatacagttcaagaccagcctggtcaacatagcaagaccccatctctacaataataataaattaataagagagggctctctctctctctctctctgatgttatcatcctaattattggaagacatggagggtctgggaggagaactggttattttttttttggagtgaacagatttcgaattaacatctagttggtgccatatcctatcagtgtgacttataaattctctcatttgatccttgcagggattttataagattagcattattatcctcacttacatatgagtaaaatgaagttcagatagtttgagtcactgcagactctaatttataaattctaggtctgagaagtcaatgaaaactaggaaaaggactcaaattaacttgactttaccccaaagccatagacatacttaatgagagagagagaaagaaccctcttattaattaattaatcattattattgtaaagatgggctcttgctatgttgccgaggctgattttgaactcctgggctcaagcagtccttccacttcaccttcccaaaatgctgggattataggtatgaggcaccactcccagccaagtcctcttttcacaaatgcacttatctcatcatggaagctgatggaaccctcataaccttatctaaatctaattaccacctaaagggcccatgtccacatatggacacactggggattcgggtttccacatatgaatttcggagggacacaaacattcagtccatggaaccaggcaagaggaaatggtggctcaacagcctttgagtatcccagacccactgtcaaagatcaatccacaggctgggtgctgtagctcatgcctgtaatcccaacactttgggaggccgaagcgggtggatcacctgaggtcaggagttcgagaccagcctggccaacatggcgaaaccccatctctagtaaaaatacaaaaattagccaggtgtggtggcgggtgcctgtaatcccagctatttgggaggctgaggcaggagaattgcttgaaactgggaagtggaggttgcagtgagctgagatcatgccactgcactccagcctggttaacagagcaaaactccatcaaaaaaaaaaaaaaaaaaaaagttaatctacagtagagaaaaggccctcaagcttcacaaagtaaaggacttttttgatgctccatttgaattctcttagcattaacgaagtccacactcactaaggcaaacttcagattctgatttcctgtgtagcttgtgcacaggaagaaaacatgttgaccacgctgacattctggttcctgtacccatccttggaagtcagatgggtcgtgggcattcctgcctctttcttgggctcacatggtttgtgtggatgtgagtcaggctctcggggctggcaccaccaagcatgactctcaggaccttcccagccaaagactggctcctgtaacacgatgacctagttaatacgatacctcctgcggaccggcccagctccagacaaccttccctcgcgtggctgtagtggaaagggcataggaatttgggttggaaaggcctgggttcaaattctggctttgccatttcctccctgtaggggtctgcagtcttcaatatggcaccgtgatgagacaggccttggcataagatgcactgagctcataccagctatgtagtcttggaaagctatttaaactctctctgcctcagcttccttctctgtagaatgggaatttggatgcctgttttacagagtgttttaaaagttagaaatatgtgtaacatgagtagagtagtagccacttggtacgtgttagatatttttgttactataagacaacgctaatgcctatttataccttaggtctcagcttacacttaacttcttttgggaaatgctttcccaacacacaggtatacacacttggtgccctttgagaacatcctgtgcttcatgtttcccaaatcctcttacataatgaaattatccacctccctcactgaccagtgagcagcttgagggcagggatttgtcttgttcattgatatatcctggatcacctacagcaggggttctcaacccccaggccactgtaccagtccatgacttgttaggagctgggccctacagcaggaggtgagcggcatgtgagtgaagcttcatctgtatttacagccactcctcatcgcttgcattaccgcctgagctccgcctcctgtcagatcaacagcggcattagattctcacaggagtgcgagccctattgtgaactgcccatgtgagggatctaggttgcatgttccttataagaatctaatgcctgatgatctgtcagtggctcccatcacccccagatgggaccatctagttgcaggaaaacaagctcagggctcccacttgttctacattatggtgagttgtgtaattatttcattatatattacaatataataataatagaaataaagtgcacaataaatgtaatgcatttgaatcatctcgaaaccatccctcccaacccctgtctgtggaaaaactgtcttccatgaaactggtccctggtaccaggaaggtgggggatagctgacctacagtataatagccaggactctctggttgtaagtgacggaaacccaactcaatcaacctaaacacaaaagaggcacaggtggggctcttgaactaagcccctgagagcctccattttttcctctgtgcttctgagccagttggcccattctttcaagttcctccatgtgatagtcaaggaagcccttacccttctggggttgcctgcttatagcttgatattccagagggggagaaaagagctatttctcattctctggttcagaaaattccaagtttaaattcacaatagccctgcttggctcatgggtcatgggccagttcaccaaggacagaagcttgtgctagtttgattagcatgcagtggagtcccacactgcattagtatccaggtgggacattacatgggaaactatcattaggtctcaccaggtagagtgcaggacccgagctgctgttggtggagaaacagcgttcctgaggtctggaattataccctagggcagtgacaagactaggcagacatacctctgctcttgtggaactctaacctagataagggagccagcagcagcaagaagacaaatccctgaacaagataaagtcagatatgataagggttagggacaaactcgaacagtgctgctgcaggtgtagccgggtcagggagatctccccaggaggcgaaatgagagctgaagcccagctgaccaggaggggccagccctgtggagaccagagcagagtgatcaggacagagggaacacaaaaagggcctgaggccagagccagctggaagtgttctagaaaaaacaactcagcctggcgcggtggctcacacctgtaattccagcacttttggaggcccaggtggatggatcttgaggtcaggagtttgagaccagcctggccaagatggtgaaactccgtctctactctaaatacaaaaattagccaggcgtggtggcccatgcctatagtcccagctacttgggaggctgaggcagaagaatctcttgaacctgggaggcggaggttgtggtcagccgagatcgtgccattgcactccagcctgggtgacaagagcgaaactccgtctaaaaaacaaacaaacaaaaaaagcagaaagtaaaagcaactcaccttgtctggctggaggggagagagcttggggaggaggggagttgatgccaaacggggtccagatcactgaggtggcaagttcccacctttcccgtgttgtgtcacacctggaaactaatacttcttgtggtgggttggggtgggtggttgtgcatcaagcaacagtcgtcagcagccccatgagtcatgtggaaggagtggccagagaaagagtggatgctctacagcaaaacacaactgatggtagcaatagtcagtgctcagacaacaggcagatgtctacattagacatgaaaaggctgcaagacagtttcacgtgcttccgaagtcaaagtcagggcttatcctcctggagggtaaggaaagactttgtgataatagtaggttctgaaggacaagtaggagtttggaagggcaagaagagggtaatgcattatttagcagagatacaacagagttaacatgttgagctggagagttgagtggggcgtgggggagggagggattccagatgttccaggaaaaagaatactgttgagctggaccctggagacacgcagggaggtgtactcgttttgaggcctgctgtaacacagtaccacaaattgagtagcttacaaccaccaaaatatattatcttacaatgctggagtctagaagttcaagatcaaggtgttggcagagccacactccctccacagcgctaggagaagttccttcctttcctcttccagcttttggtagctccaggcattccttggcttgtgctggcatcattttcatctctgcctcttcttcacatggccatcttccctctgtgtgtctctgtgtcttcgcagcattctcttctctgtgtctctctgctcttctaaaataaggacaacagttacattgcatcaagacccactctacttcggtataatctcatcttaacttaaaattacctctgcaatcaccctttttctaattacattcacattctaaggtagagggctcaggacttcaacatatcttttggggggacgcagcccaacccacagcaagcagccatggctcagaggctgataggtaggttgagccagagcatgacgggttatggtggctgagacttggggctacaaaatggcatgaccaatcagcgtgctaccatgggttagagagagtgcttcgggtgagggacaaccatcattttgatcctgggtggcgtcattgggaatgaggaggatctgaaggatgcaggaagtggcagagagacttgaagataatgccttggtctctactgcctcagtgccactgcttgaccaggagggggtggtcacagcttttggagggagaatgctgagcttggttcagtgcatgttgagtctgagttgacatgtgacatacgtgtggcagtgtacatgataccaggatagcagcagcagcatcgaaatgccactcacccccagagttccatccactcacatcccgctcacttattgcccctccacacactgaaatgttctctttctcccatttagctggtgatggcagtcatcatgttgcctgccatgaattttaaaaacctactctgtgctggatgctttgctaattactttatgtacatcaccttatggaattcttcaaataacttgatgagataggtctgattatgcccattttgcagaagaagataactgaggcttagattgagttacctgtctagtctcacactagacagagttggggtcgtatttggacccaggcttgtctttccgtgcctttaattttcttatcactctgcctcccatagcattttctttgtatttctcagatagggctcatcttattttctcttattatccacatatgacagttctgctagagtataaactcgttgatggaaagggctgtagctccccagctagctctgtcgtggttggttgaactagaccaggagcttgtaggtgaaaggtttgagatggcaggtgatacgcatgtgtctgtttggaggcagagagatgaacaaagggagggatgtccagtggtgtcttcaggtctacatgcctagatgctggagggatgaagtcatgggacctgcagagaacccagctgaggaagccagtgtcgatgcaggctatggctttcccaccagactggaagaaacaggtcttacgaggtagagtgcaggacctgagctgctgatggtggaaaaacagcattcttgaggtctggaattacaccccagggcagtgatgagactaggcagacatacctctgctcttgtggaactctaatctggataagggagccagcagcagcaaaaagacaaatccctgaacaagataaagtcagatatgataagggttagggacaaactcgaacagtgctgctgcgggtgtagccgggtcagggagacctccccaggaggtgaaatgagagctgaagtccagctgaccaagaggggccagccatgtggagaccagagcagagtgattaggacagagggaacaagaaaagggcctgaggccagaaccagctgggggtgttctagaaaaagcaactcaccttgtctggctggacgggagagagcttggggaggaggggtttgatgccacacagggtccagatcactggggtggtgagttcccacctttcccgtgtcatgtcacatctggaaattagtgatatttgtgcccctttccaaggacctccactgaggctggcagtggagggctgtctccacattgtgctgtaaggggactgctttccgtggagctgggcgggtaacagacagagcccacattggacagctctggtgcctcgagttgccccaggccccactggctgccccaggggctgagatgagcacagtctaagaaaacttttggttcatttgggcctaactgtgctccagctcccctgctgggaggctgtgatggagggcctgtagaccgtgctgacttcgaatttgctttgactgcaataagaacccatgaaagggtttccagccagggactaatcgcaggggtgtctaatcttttggcttccctgggccatgttggaagaagaattgtcttgggccacatataaaatactctaacattaacgataactgataagctaaaaaaaatcacaaaaaaatcaatgttttaagaaagtttatgaatttgtgttgggccgcattcaagctatcctgggctgtatgtactcatgctaggtgataatcattttcaaagacgctgggtgtggtggctcactcctgaaatcccagcactttgggaagccaagacgggtggatcacctgaggttgggggttcgagaccagcctggctaacatggtgaaaccctgtctctattaaaaatacaaaaattagctgggtgtggtggcatgtgcctgtaatcccagctacttgggaggctgaggcaggagaaccacttgaaccctggaagtggaggttgtagtgagctgagatcgagccactgcactccagcctgggtggcagagtgaggctccatctcaaaaaaaaaaagaaaaagaaaaagtttaaagatgactttggatgcaccatggaaaatgaggggagggggaattggagacaggaattggaagtggggagtaagtagggctgccacttatagctggggagactgtatattgctcacctctggactgtggtgtgaatggtggcccttgggttgtttgacatgatggccctaggatctgggtacaaggtggtggtagcttggaccaggacatgagcagatagatggagagaaatggatagattctggatatatttggaagttgagttgataggacatgctaataatttagctgtggagaggcaggagggaatgagagaaacctcagatgactgtgacttgagtgacagggtggggggtgctatttactgagagggaagattggtataggaatagctggtatgtagggaaaaatctaaagaaagcccagataaacttgcagaaactggcaaaggaagcaaccacatgccacatgggagcgctgtctggggccctgagaccaacaagcagttttctcctggcctgggaagcccattgggctgagagatttaagacaaggctgatggcattgtggagggctagctttaggggcactgtggcctgggcagttgcacacttagaccctgtgcttggttgcaggctttgctgtctctgtcttaaaatttttagtgattcttgaaccagggacgctgcattttctttacctttttcttttctttacttttctttatttctttttttttgcggggggggggggaggtggtgggcggggacagagtgttactctgtcacccaggctggagtgcagtggcatgatctcagctcactgcaacatctgcctcctgggttcaagcaattctcgtgtctcagcctcccgagtagctgggactataggcgcccaccaccacatccagctaattttttgtattttagcaaagacagggtttctttctttctttctttctttctttctttctttctttctttctttctttctttgtttctttctttctttctttctttctttctttttttgagacagagtcttgctctgtcacccagactggagtgtagtggcacaatctcggctcactgaaagctcctgggttcatgccattctcctgcctcagcctctggagtagctgggactacaggcgcccaccagcttgcctggctaatttttcgtatttttagtagagacggggtttcaccgtgttagccaggatggtcttgatctcctgacctcatgatctgcccgccttggcctcccaaagtgctgggattacaggcgtgagccactgcgcctggtgcaaaggcaaggtttcactgtgttgctcaggctggtcttgaactcctgagctcagacaatccgcctacctcggcttcccaaagtgctaggattacaggcatgagccactgtgcctggcctgactattgggggaaactcagcccctgatatttcacgtgcgtccttttctattttccctaagtgtcagccagtctgagaaataaagggaaagagtacaaaacagagaaattttaaagctgggtgtccgggggagacatcacatgttggcaggttccgtgatgcccccaagccacaaaaccagcaagcttggggagggagtgtacgaatagggtgtgggtcacagagatcacatgcttcacgaggtaatagaatattacaaggcaaatggaggcagggcgagatcacaggaccgaggcaaaattagaattgctaatgaagtttccgacatgcattgtcattgataacatcttattaggagacagggtttgagagcagacaaccggtctgaccaaaatttattaggtgggaatttcctcgtcctaataagcctgggagcactacgggcgaccggggattatttcatcctttatgtacaaccgtgaaagacagacattcccaaagtggccattttagagacctccccttgggaacgcattctgcttctcagggatgttccttgctgagaaaaagaattcagcgatatttctcctatttgcttttgaaagaagagaaatatagctctgttccgcccagcccacaggcagccagactttaaggttatctcctttgttccctgaacatcgctgttaccctgtttttttcaagatgcccagatttcatattgtttaaacaatttgtgcagttaatgcaatcatcacagggtcctgaggcgacattcatcctcagcttacaaagatgacaggattaagagattaaaggcaggcataggaaatcacaagagtattgattggggaagtgataagtgtccatgaaatcttcacaattgatgttaagagattgcagtaaagacaggcataagaaattataaaagtataattttggggaactaataaatgtccatgaaatcatcacaatttatgttcagagattgcagtaaagacagacataagaaattataaaagtattaatttggagaacttaataaatgtccatgaaatcttcacaatttatgttcttctgccatggcttcagccagtccctccgttcggggtccctgacttcctgcaacacctgaccctgcattttcatattttactgggttccatgaattttgaagctggttatgctgtggtggataaagagacaacaccagtaagcttgggccagcttgtacagagctacaaattctgaccaaaatgaagccaggggcaacagaagcttatgacttaatgtatgtgaagtgcttggaaaagtgcctggattatagtaagtgttgcataaatgtcagctataagagtaataagagggctgggcccagtggctcacgcctgtaatcccagcattttgggaggctgaggtgggtggatcatgaggtcaggagattgagaccatcctggctaacatggtgaaaccccgtctctactaaaaatacaacaacaacaacaaaaaattagccaggcatgggggcagacacctgtagtcccagctactcgagaggctgaggtaggagaatggcgtgaacgtgggaggcagagcttgcagcgaagggagatcgcgccactgcactccagcctgggcgacagagcgagactccgtctcaaaaaaaataaaagagtaataagaggccgggcgtggtggctcacgcctgtaatcctagcactttgggaggccaaggcgggcggatcacctgaggtcaggagttcgagaccagcctggccaacagtggcaaaaccccatctctactaaaaatacaaaattagccgagcatggtggtgtacgcctgtaatcccagctacttgggaggctgaggcaggagaatcgcttgaactcgggaggtggaggttgcagtgagccgagatcgtgccattgcactccagcctgggcaacaagggcaaaactctgtctcaaaaataataataataataataataataataataataataataataaaagagtaataagagttgttataaggaatgtttaggagtgtgagccaagaggatccttgtgcttcagtctcaggaggaagggaacagaaaaagctgggtagagatgaatatttggggagcaaagttgtgagcaatagctagaactcgatttggacatcaaagggtagcagttactagctaccagccacatccacatcctgggctcagaagttgggtcctggtggtcccaatacgtgtggctgccagggacgctttgaaagaaacctgtgcctagggaattttacccaaggcccccagtgatggagggaagaaagcctgcagtgtttcttctagcctccaggagactgatggttcaggaaggaagagctggccggggtggcgccaggagctccctgaggttctggagggaggacctcacccaacctgtcagtgcatatgttggcgcacacaccttcccttccctcattctggcagaaagagggatcaatggcctgcttctaagatttggtttcaaggccaggccaggcttccagatggacaggactgggatctcacagtgcaatttcactgctctctgatgatgtccattgctgtttgtcaccttgaaaaacagcatcagggaatgaacccatcttctgggactgaggcccaggtctctttagcaagccttgttatgtggtacgaaagcaaagaggacagtggcgtcacccaatcagcacacatttggtagcaccccatttattctttgctgtgctggagacttcatagtgaaccaaaccttatcttatgagagacacagacattcttctggctgtgtattgctgagtaacaagccagccctaaccttaggttcaagcaacaaccattttcttagagcccatgatctttgcggtgaggaattcaggcactccttggttgggcaattctttagtactgggcgttgactaaggtcgcctcgtggagtgtagcaagcagatggtcaggctgggaggtctgagatggccttgctcctatggcggacatctccacggggaaggtctgagctggagtcaccggccagaggacctacagacggcctctgcaacgtgatggtctctgggtggttcagcttcttatatggcggctcacagagtgtttccagacaggaggtagaagctgccagtcttgtaaggcctgagcccagaaactggcatgtagggtcactcactgccacattattctgttggtcactgcagtcacagaacccatgcagattcaaggggaggggacatagaccccacctctcaatgggaggcatgtcaaagcattagtggcctttattatttatttatttatttgttgagacagggtctcactctgtcacccaggttggagtgcagtggtgcgatcatgattcactgcagcctctaactcctgggcttaagccatcctcccgcctcagccccccaagtagctgggactacaggtatgtatcaccacacctggctaatttttaaatattttgtagagacgggagtctccctatattgcccaggctgggtctcgaactcctggactcaagcaattatcactgttgtagttgagtgttataagagatatgtcggccaggtggctcatgcctgtaatcccagcactttgggaggccgagacgggtggatcgcaaggtccggagattgagaccatcctggctaacacggagaaacctcgtctctactaaaaatacaaaaaaattagccgggcgtagtggcgggcgcctgtagtcccagctactcgggaggctgagacaggagaatggcgtgaacccaggaggcggagcttgcagtgagccgagatcatgccactgccctccagcctgggcaacagagcgagactccatctcaaaaaaaaaaaaaaaaagatatatgtcaaatggtatataattacatggagaagggagaccccgcttctgtgcgggtattggggcgtggcagataggttgcaggaggagagatcagggaggatgtcatcgaggtgctaacattggaacatttgaactaggccttgaagacagctgggatttgccaatgaatggaaggtaggatagtggggagagacattcccagtggggagaacagcgtgtgcgaaggcacagatgcatgggagtaatgtggtgtgttggaagcaaaggaggtgcaggcatcggggcagcagataagcccagagaagcaagaagagcaatatcgtgtttttcttttctgtttttgagatggagtctcactctgccacccaggctggagtgcagtggtgctatctgagctcactgcaacctctgcctcccagtttcaagcgattcttctgcctcagcctcccaagtagctgggactacagacacccaccaccacacctggctaatttttgtatttttagtagagacggggtttcactacgttggccaggatggtcttgatctcctgacctcaggtgatctgcctgcctcggcctcccaaagtgctgggattacaggtgtcagccaccgtgcctggtcttctttcttttcttttctttctttttttttagacagactctcactctgtcgcccaggctgcagtgcagtggcacgatctcagctcactgcaacctccttctcccagattcaagcggttctcctgcctcagtctcctgagtagctgggactacagacacccgccaccacacctggctcatttttgtatttttagtagggacagggtttcactatgttggccaggctggtcttgaactcctgacctaaagtgatccacccaccttggcctcccaaaatgctgggattacaggcgtgaaccaccacacctggccaagatcatgtttttcagtaagggattagtgtgatcaaattcgcattatggaaaaacatttgggttgggcacagtggctcatgcctgtaatcccagcactttgggaggccagggcgggaggatcacttgaggccaggaatttgagaccagccttgccaacatggcaaaatcccgtttctattaaaagtataaaaattagctgagcatggtggcgtgcatctataatcttaggtactcaggaggctgaggtaggataatcacttgaacccaggaggtggaggttgcagtgagctgagattgcaacatcactgcactctagcctgggcaacagaatgagactctgtctcaaataaataaataaataaacaaataaataagaaaaagaaagaaaaatatttgtactagtgtggagggtgacctgaggtgacaggaagatcaggctcctgtaataaccttgactctagctcctaaggacctctatggaggccgtgatagtgggtggaagagagggaggacagatctgggagacttgatagaacttggtgaccacctgacatggagaatgagcgggagtgaagcgtctaggcagccctgatgggttctctgctgggatgtggggtggatggtggtggcactgctccccagatggcagatgggagcaattttggaggggaaacactgagggcagccctggattattgcgtttaaggtgccaagaagagatgttcgggaggggaggggagcgaaggtggtccccacatgaagtctgaactggaaatacggatttggagatcatcagcttttaggcattagtttagagagtggggctgtctgagacttcccagagtgtgtgagtggactagaagtaaaaagagggctggggagggagcctgggcacattccaacatcttagatgtggacaaaagaagacaggcccacagtggagggagaacagcagccatcagggaggccaaaggaggatgaagacaggtctcctggaaggcgaaggaggaaggtttccagaaacaaggtgctgtctggatgatcatgaccctgaacaggcacctggagattaggaagctaagcagaaacgcttctatttatttatttatttatttattgttttgaggtggagtttcgctcttgttgcccaggctggagggcaatggcacggtctcagctcaccgcgacctctgtcccctggattccagtgattctcctgcctcagcctcccgagtagctgagactacaggcatgtgccaccacgcccggctaattttgtatttttagtagagacggggtttctccatgttggtcaggctggtctcgaactcccaacctcaggtgatccgcctgccttggcctcccaaagtgctgggattacaggtgtgagccactgcgcccggccagcagaaactcttctttccaaaagcatacattcctagaatcccagcaccgctcgctccaggaaacttctgtttcaggcaggtctccgaggaaaaccccccaggcattcaggtgcctggtttttctctagatggtttttagggtataaaaaccttgaaaaactggcttccctgaatagatcattccagtgttgtgtcatctgatttcaagaggccttccccaggcccagttagtactttcctccgttcacattgagctgtatttgaagatgtgtgtgtgtgtgtgcatgcatgtgtgtttttagtgtgtgtgtgcgcgtgtgggtgtcccacacctgtctttggatggttaagcctcaaggtctcttctcatgcccaaaccaaattcatttttctgtcctcccttacattaggccagggggactgggcacattttcctctccgctttaaaacttcactttatctcagtttcctccttccaagactggctgtggagtgggcgagtctcccctgccccttcccttcaactttcaagacaagcttctggagttcttagtagaggcagcatggtttaatggcacctgcataggatttggaatcagacacgcctgagtcccagggtgtgcccttggatacctgactgcatagtgccacggccaggagcatggactggatttgcctggatacaaattgtggctctaccccttccagcagtgtgaggcaaggtctttaacctccccctgcctcagtttcttcatctatatatgggaatccttatatgagcccatcctagggctctcccaggaggggcatttaatgccattaaatgacttagcacatgtaaagcgccctgttcgtagttcaagctaaaaaatggttataactattcgttgtaaaatggaaacgacctccttggactttcgtttgaaaatgaaactggaaggtcattgagtatagggactgtttctttgcttccttaacatggattacagggtctgccccagtagctgttgctgctcagtaaatatttttggaatgagtgaaatgataaatgaatccctttgttataaatcagtagctttctctcctgaagacctcctgacagccagcttaaggggccaaggcccctgcctaagagattctctttgagcattctccactcagtttgtaggattttttttttttaaatgaagtgatatatacataagataaaattagccactttgtagccgggcgtggtggcgcgtgcctgtagtcccagctacagctctcagttgggaggctgaggcagaagaatcgcttgaacctgggaggtggaggttgcagtgagccgagatcgcaccactgcactccagcctgggcgacagagcgagactgtatctcaaaaagagaaaaataaataaaaattaaaattaaaaaaataaaaaagaggaatattattcttccatatgcctataatactgttattatactcagaaaatgaacaaaaattccctgatgtcttacattgggtctgtattaaaattcccttaattatcctcaaacgtattgctagtttatgtgaactgcaggccaatcaaggatcacatgttacatttggttttgtctctttaatggctttaatgtaggttactacccaccccaatcccattttatcccatgatactgactttttgaagagactagaccagttttcttgtagaatatcaaaatactggtttgttaaattacttccttgtggtgtcatttaatttgtttttctatgagctgtatttcctgtaacctggaaattagatctagaggtttgattagattcagggtaaacgcttttggcaagaatccttgattttataaacttcatcttgcatcccatcaggagatgtacgaggtcagggtacccgttgtgcatgacactaaacttaatcattttataaggtggggatcgccagctctgtccaatttatgatgctccgcggttgacactctgaacaaccactcccaacacatccactgatcatcagctattagctgggggatgggttgatttggctgcaccaaagaaaaaagaaaatagatgagggttgggtgaggtggaggtggggttgcaaaaatggtgatttcctgagcctgccatcccttccttgcatctgactgcctggcatccttctgaaaaggagtgctttctctcatcacctagtgatgactgtggtccttctaaagtgtcaagatgaatgtttaattacgaatttttagggtgtggagttggcataacattcttttctaatggtggtaaatgaatttttctgagtgtcagtatggactaatggatttttatttattcatggcttacaatcaaatacactaattgttctttttgtgtgtgtgtgtgtgactgagtcttgctttgtctcccaagctggagtacagtggtgcgatctcggctcactgcaacctctgcctcccaggttcaagcagttctcatgcttcagcctcctgagtagctggaatcacaggcgtgtgccaccatgtccggctatttttttgtatttttagtagagacggagtttcgccatgttagccaggctggtctcgaactcctggcctcaagtgatccacctgcctcagcctcccaaagtgctgggatgacaggtgtgagccaccacgccaggcctaattgttttttgatgcccacattgtcccaagtttggccaggaggagcccctcgaagttgactcttgggtctttctttgcttcctggcacaagcagatgtcccagactcccctggtacttctccttcctcaaatctgcaattaactatttctcaaaggagagccaattccttttattgcaggatggggtttaaaacaaagatagaggtgtagtatcctcattgccacaggcgtgtcaatgattctaggccctttcagcagatagtagctgggagatctgtatttttaaaaagcatgagttcataatgacttctatattaattttaacattataggttttttattatcttcttttattttatatctttaccttttaccctggaaatctcggttcctgattaggaacattaatataattacttgtttgctttactctaccatatcacataaaatcgtttcaaaatcctgaacccaatattgccaccagtggaacagctactgagtgaagtttaagctttttttgtggttctctttgtccttagattatatcccattaatattgtacagccagaacactgggtgctgatattacttgaaatgattctttcctctgtgtggtcatattactgtttattatatgattggatttatttgtttcagcgttttttgttttttgttttttaattatagggtctgcttgttttccccttgtggtttaattctactttttggccatgtcaaacgtttacaaggtacgaaagtcaaactgtataacaacatagtccagagatacttgctttccccctccacatactgtttctccctccccttgtgggaaaccattcttttattagcttctggtgtatcctttcagtgtttccttgtgctttttgaagtgttcataacagtcccatcttttagattgattccaacctctgtgccacttcctctatggagatttctctaaaccttggaccgtcatccagttctttctccgtatctcaatcctagagcattctttatctccatgtcctgtggctctattcatctatttggggtcttaattacatgccattgtgcattgttgtgacttacatttgctcacgtcttgtcactcaatgtcttgtttctgcatgttccttgaggataggataatggctagaattcttttgtatttctcaacaatgtctaaaaaaggactgggcatacagtaataggtaatagattcagtcaattcttttttttaattttttgatacagactcttgctctgtcgtccagactggagtgcagtgacgcgatcttggctcactgcaacctccaacccctcggttcaagcgattctcctgcctcagcctcccaagtagctggggttacaggcatgcaccaccatgcctggctgatttttgtattttttgtggagatggggtttcgccatgttggccaggctggtctccaactcctgacctcagttgatccacctgcctcagcctcccaaagtgctgggattaaaggagtgaaccactacgcccgacctcagtcaattcttgttattgataatagttatgttctatcaagccaccgtgagtactgaattggggaatactgactcttttgctcccagggaaaatatggagttagcttcctatgggcatctgttcacaatattttcattcactagttaaattaatatataactgtattttatgaatgctgctgtgtaaagataccttattttatgtacatatatatatatacatatatatatgtatgtgtttttttttttttgagttggagtcttgctctgtcacccaggctggagtgcagtggtgtgatctcggctcactgcaacttccacctcctgggttgaagcgattctcctgccttggcctcccaagtagctggggttacaggcacctgccaccacacccagctaattttttaaaaaatattattggtagagacagggtttcaccatgttgaccaggctggtcttgaactcctgacctcaagtgatccacctgcctcggcctcccaaagtgttgggattacaggcgtgagccaccgcacctggtcctaacacatacattttctttataaggcacatcaaagcctttgagtgcttaggaacactacacagcacttaggcactacatctgggggccattttccacagtgaaaccaccaacacaaaacacaaaaatgcaaaagccatggctctaaatacactgtgaggacatttgtttacagtgcgatatgagagctgaaaccagaagggagagggtcacctccttcagcctccactgagaatgtgtgcgccaaagctactcaaactttgcaggtctgcctatatccgcaaatgaccctaaatcacctcaagtattgattttgggattaaaaacatacaacgttagtaagtaggcacatttgaaatgtggaatcttcgaataaataagattgaatttgttggattaaatccatttgaatgagttgtggaaacttggactacttgtgttgcctctctgggtttctttttcctgaaacccagaaatcctatttcctttttttgttttgttttgttttcttttttgagatggagtctcgctcctgtcacccaggctggagtgcggtggcgtgctcttggctctccgcaacctccgcctcccaggttcaagcaattctcctgtctcagcctcctgagtagccgggactacaggcgcacgccactgcaccaagctaatttttatatttttagtagagacggggtttcaccatgttggccaggctggtcttgaactcctgacctcaggtgatcctcccacctcggcctctcaaagtgttgggattacaggggtgagccaccgcgcctggccagaaatcccatttcctgacttgttccatgactgggtgatctttgatctttgagcactgaaattgcaggaactgagtgggcactgccttttcttttactctggcttcctgtggttggtgcggtcctgaccactgtcctttccctgcaggtttgtggatttccatgcagctgcctccacctgctcaccctcccgggcttccttgctcaccggccggcttggccttcgcaatggagtcacacgcaactttgcagtcacttctgtgggaggccttccgctcaacgagaccaccttggcagaggtgctgcagcaggcgggttacgtcactgggataataggtaactctgggccccgtctgcctgttgcatttactgcagtggcagccgccttgtgtttgcaaattcccaacatactccctgtctgctttcctgttcatgtcttgctgtgtgagttagggatgctctcagctataaggaactgaaaagacctaacagtgaattaaaacatacatggagctattttcctcccattatagcaagttttgtggtaactggttgctttcattaattcagctgctcaaagatgctgccgggagccaggtgctctcactcgatctttctgctctgccatccttagcatgttggtgtttggtgtttgtcctcatgctcactgcctcatgactgccatccagcgactttaggcccctgaaccacgatttggctcaaggaaggaagaagagaagggagatggctcagctctgcctgcaccccaagaattgcacttatatcttattggccagagctgggtcttttggccacgcctcactgctgcactcccagattgagaaactggggacagcattgtagtgactgacttgaacttgggcatggtaatcttcctccctttgaacaaaaccacagttctattagcaggatacatggggacatgggcattgctgggagaccagcaacgtctgccacattgtccaatgactccctctcctttaaaacatttttttaggcatctcttactcagcatttattatgtgctaggcactgggctgtttattggcatgaagatgattattgtattggcaagagaactgagtttcaggccggtgaagagaagctgcctaacctggaggggtggaggccaggtctaggcaggtatatctgttcccagccttgccctgaggctctgcctcactgcccttctcccctccaggagccaagacagcccagtattcccagaagtatcctcagctccctgtgtttgttagtctaactctcaaagagctggaccccttgggatccctgcctcctccactatacaggaaattgcaagggagggagggtgcaaccacaagcgggtggccctgtgggcatgccttgggtgtctgaaccgtgtgaacctgtgggaggttgttctacccagacccagggctggtgcctctgctattggcccttttatcccactctgggttaaagagcctgatatccttttacggaagctcaacctggagtgcggcattctttgtcccagaaggggtaagtcccaggctgtaggagagaccaattaaggtcacacacttctctttttccaatccctttcttcccataccccaaggagtcattatgttaacaacatcaacaccaagacaccatttgtgaaactgccactgtgggctgactctccttactaggccagttacatgcgtccatgtaaacctcacagccagctgaacgaagtggctcacgcctgtaatcccagcactatggaaggccgaggtgggaggatccctcgagcccaggagatcgagaccagcctgggcaccatagtgagactctgtatctacaaataagtaaataaataataaaactcatagccaggaagagttaggtcccagggctgtcccagactcagcccctatgctgcagaagtggggctggcttcttctggagctgaatttgacctcactggcccctccgtcttcatgcctttaaactcccagtaagcaactgtttgcagcttgactgtttagctgcattcctcaccccctcaccactcacgacaccttttgcacatcctgggcaggatatttaagcatatccagctgttgcaattatgaactaaagtacacttttaggaaaaattaaagacccaccaaaggaatatcagatccttttacaacactcacactttgcttctaatcttggtccatgtttatgtgttgcctagctgtgcgaataccactgggctccacttttccccctttcacattattctatgtttccatgtcatataattttacatagtataatttttatgattaaacaatacttttcataattttaatataatgtcatgttctcatgtaatgtttaatccaaatatttcacataatgcttaatacatttctctcaatcttttttatttatttgggacaaagtcttactctgtcacccaggctggagtacagtggctcaatctctgcccactgcaacccccacctcccgggttcaagtgattctcctgcctcagcctcccgagtagttgggattacaggcgtgcaccaccacacccagctaatttttgtatttttagtagagataaggttttgccacgttgcccaggctagtctcaaactcctggcctcatgtgatccgcctgcctcggcctcccaaagtgctgggattacagacatgagccactcaattgagagaaattgagagcccatttctctcaattttttattaatcttttttttcaatcccatagagcagttgcagggagggaataatggactcctagaggcccttcatccagtttcaccgattcttaatttttgctacatgcagttgtcttgaaaaaatagatcgatagttccttattgaggccacatcaaataatgtacttagacatactcctgtggttgcccgttaatctctcgtttgagcggtttaatgctgccagcgtctcaatctttgtaccacattcttttctttgccccctcaccatgggggtggcgtccctggggtctactcctcagagcggaagagcagatcagagagttctgacactgtcagagctcttgccacacattgcccgattattcccccagactgagcgcatttgcagaccgaggagcagcagggtgtctgagtttcctcatttgctgccccgtaggtgtctcggtgcttgaactgcgggctgctgatgttggccagagaggaagatgatgaaaccaggcaggaagcgggcatttctgagacgatgtggggcggtgcacctgcaccctgggcctcctggtgcctttgcagggccccagcgcgggagggcaaagtgaaggagcccatgtggggttgctgtgtctgtggagccctctttgaggggcagaggctcaggcttctccgggctcctggtgatgggctgtcttcccctttcactgtggtttcccgtgtgagtctggggtcatcctttatgtgtccctgtggacaccgtctcggccccagagagcaaagcctggcttgtacaccacattgcagcttcttttggcttgtccacagtgcgaggcgaagctaatggagagctgagtgtgtgatcagctcctcagggggctgtggtacccctatggggattcctctgaaaatctctcttatgtttttctacaggcaaatggcatcttggacaccacggctcttatcaccccaacttccgtggtaagaattcttttggggatttgttacctgggaaacagaaaataaaggtctctgtgtaagactccatgaacagctaagccatcctgtctctgggggcaaccctaagttaggacatctttgttcacgaggtcatttgagtgcatttggggtgccagggctctccgggaccttacatcccacttgctggcatcttccttgactgtccttccttggtgcctgtttgcccttccaactgccccatcacaggcccatcagcttttttgccatctctcggttctttacacctcagggaacattctgccccatgaggtccagacatggctaatctgggaagaagtaaaaattgactgatgggttcaccgaagcaggaaacctggccatagacccaaacaggagatgctgcctcttggcctcttcctgcagcctttgcttcctcaccctctggccttggggaagtaggccaagatcaagctaccaaagctggttctctgaaaatcactttgctgaagggcggattctccaaacgtccaattcactgaattactgatggtttttcaaagttgcagttcgtgccactgaccttttccatttcctataggaagccgtggactttctcttaaaggcatttaccatgatctcagctttggtggcttctcctgtccctggccccttcctcttctgccattttataagcaaatgtgattctctgactattttgcagacttctcccctcccctgccccagtatctctccctatctctatggaaaacggctgaattgttctgtcctagacctggcggaaggtttgcattggaagatttttgcatttggagaatgactttcagagggttggcctggagccagccttcagcagggacccactggtcagtaaccccattggctgacgtcttcttcaactcttacctcccctttgatgctcattcctctccctctcctcccttgagccccttttcccaggtgggcattcgtggcatcatccacacatgctttaaaaaaaatgacagatgggagaagtgaagacctggcttttgcactcactaaaaattactccagaacttgtttcctccttggtcttcagttttctcacttgacagttgaggggttggaccagatcaggtgttggcaccttgagggcatattcctgtggtgaggggatactgagaccagctcctatgcagcaggaagtggtaccatgatggatctggtgtctcctgtgggtgtgggaagtgggaagaaagagtacctcctacctatttgctctttggaccagacaattccaaaaagccttctggcatggacactctgaggtttcttcatgcttatgtccaagttcactccttttccctcctgcctcttacatcctctctgcggtgcactgtcctggttccccgtctcactctgtctcccaggctagagtgcagtggcatgatctcggctcactgcaacctccgcctcccaggttcaagtgattctcatgcctcagcctcccaagtagctgggactacaggtgcccgccaccatgcctggttaatcttttgattaaaagcttgggttggagaagagatagaatgaaggaggaagtcggaaaaaaacttcacatgccctgggttatgccaagcacacttacacattccttctaagcacccacgctcctcttgctgccctgggctgttcctcaggtcagggctcctgcaaacacaacgaggtctttctaacactggggtatgaggatgcctatgatttagatcagtggttggcatagacctgtggtccaaatccagtatgctagctgtttttgtaaataaaattttattagaaaacagcaaggccaagcatggtggctcacgcctgtaatcccagcactttgggaggctgaggtgggtggatcacctgaggtcaggagtttgagatcagccaacatggtgaacccctgtctctactaaaaaaataaaaaattagctcagcacagtggtgcatgcctgtaaccccagctatttgggaggctgaggcaggggaaccgcttgaacccaggaggtggaggttgcagtgagttgagattgcaccactccagcctaggcgacaaaactgaaactccatctcaagaaaaaaaaagaaaaaaagaaaacagccaatatgtacagtcatttgtgtacatattgtctgtgggtgtgtttgcgctacaatggcagagttgagtggccttaacagagatcatctgacccacaaaacctaaaatgtttactatttggctctttccggcagaagtttgctctccttggtggagagtcatcctgataccagatgcagtagcatttcagggctatgttgtgtacctagggggtagctaaatccatttgtgcaaaccaagttagcatgaagatatcaattttttaaaaatacaacaaacaggctgggcatggtggctcatgcctatagtcccagcactttgggaggccgaggcaggtggattacttgaggtcagcagtttgcaaccagcctggccaacatgctgaaatcccatctctacaaaaatacaaagattagctgggcgtggtgacaggtgcctgtagtcccagctactcgggaggctgaagcacgagaatcgcttgaacccaggaggtggaggttgcatgagctgagatcgtgccactgcactccagcctgggagacagactgagactccgtctcaaaaagaaaaaaaaatacgacaagcatctactagttattctacatacaccacatattgggttggcaaagatctaatgtctaactcgaggagtgcatcactaatggggaagacggtattacccagatgataaaaagtctgtaggctacactaggagaatgggttgagtgcagggctgtggcaggcgggatgcagtgaagagcagggaaattctgtaggaaacttcacactcaaactgggctgggaagtgctaatgcagtttcacctgtgagagacacagagcagataattccaggcaaagccaccgaggccccaaagcatgaggctcacagggaactgaagagagcttgcttcttttaggaagggtgcttatagagagggccaaaaacgatttggaggggcaggagttgaagctgaaaacacagctctccctactcctgggcctggaatttgaggctaatgagaaatagcaattctttgtgagattcgagttctatctacctctaggaaataaagagagctgaagcagttacctgggtaattggggaaggtttcctttttctggagaatttttgcattctagctgcatatgcagctatagcctttgattaaaagcttgggctgggccgggcgcggtggctcacacctgtaatcccagcactttgggaggctgaggtgggtgtatcacgaggtcaggagattgagaccatcctggctaacacggtgaaaacccatctctactaaaaatacaaaaaattagccgggcgtggtggcacgtgcctgtagtcccagctactcaggaggctgaggcaggagaatggcatgaacctgggaggcggagcttgcattgagccgagatttccccactgcactccagcctgggtgacagagcgagactccgtctcaaaaaataaaataaaataaaataaaataaataaatacataaataaagcttgggctggagaagagatagaaggaaggaggaactcagaagaaaacttcaacacaaaggctttgggtttcaatgctcacacccttccatccctcaccttcactccaccactccaagcccaaattctgtcagccttttgagtcccagctgaaaggcagtatctttcaaggcgcattttgagattcctgccccatccccatcccaccatctctatcgggggtaacttcctgtgatcactcttgttggctcacctattcatctcttatttcttaatctttatatcttattttctcctcacatgaaaagtctcttgaaggcagaatttattctttctaaaaaattttttataattttttttttctctgtggttgtggcagctaagaacaactgttttttttttatcccttaaagtgtcatgtatatagtaggttttcaccaaatactgagtatgtccataatttcgttgaagatgttaggcattcaataattctctccacttcctcccaaactgggttaattctaatcacaagatgttttgcaaatctaatctaacagccagaacccagcaaagtgattttctatgcatactacaaagggatattaatcaaatcctcttataattacatactctatagcactgcagtattaaatcataggaaattacatttttgtcgtgggtgtacaaaggcaagcacatggagtcgcagccacgtgggggtgctaaccggttgcttctattccaggttttgattactactttggaatcccatatagccatgatatgggctgtactgatactccaggctacaaccaccctccttgtccagcgtgtccacagggtgatggaccatcaaggtaatgctgtctgacacatttgcgataggctccaggacaaggcaaagttccaagactgtggtccatcagcaataaattaaagatgcagacaggaaacagttaagacggcaaataagatacacggtacattctgtgcaaatttaaatgtgttatttgcagggagtgcaagaaacctttcaacgatgaggtccacaaaattcttctattgaaatttttacaggttcctcagactattgagctcagctagggagaggcttgtgctgctagggtctcacacatgtggggcctccctcctcctctgcctgctgtctttgcttctagcccagacactggacataaggagggagggagggagagagcagaggagagagacagaggagagagagagagagagagacagaggagagagagagagagagagagagagacagaggagagagagagagagagacagaggagagagagagagagagagacagagagagagagagagagagacagagacagagagagagagaacaggattccttttgagcttctccccgcatggacaactaagccagcattctgatgttggaatgccaaacaggcaccaaataggatgttttgaaaaaacatttaatgaaatgggaaaatgcttatgatataatagtaagtgaaaaaaaaaaaaaagcaggaagcaagtcatcaacggtaagatcctaatgagctctgtaaccctatctttgtagtcctatcaacggagactcaaaggagatatgccataatgttatcaaggaatctctctggtcgtgggactcagggttttcattttcttttttctttctttttttttttttttgagatggagtgttgctctcttacccaggctagagcgcagtggcgcgatctcggctcactgcaacctctgcctccctggttcaagagattctcttgcctcagcctcttgagtagctaggattacaggtacccactaccacaccaggctaatttttgtatttttagaagagacggggtttcgccatgttggccaggctggtcttgaactcctgacctcaggtgatctgcccacttcggcctcccaaagtgctgggatttcaggcgtgagtcaccgcacccagcggtgactctttctccactttctctttattttcctctttgtcattgtatttcctaagtatcctgagatgcatttatgatcacaaaaaaaagatgataagcctcactcaggtaataaagcagcacaaaacacgtgttcccttgttcggacagagcactgtggttatttctaaggctacagttgtctgagccacttgggaaaggtgagtctcagctcgtctatctataaaacaatagttaatataatagtgggtatttattgagaaattgttacattctaagcactgtctatatttatctgtaatccacgtgaccactgtgtgaggtaggtatttcttaggttggtgcaaaagtaattgcggtttttgctgttgaaagtaaaaccacaattacttttgcaccaacctgatacctgattttacagataaggaagcttatgttgcccaggttacaccggagctggaaagaggtaggaatggagattccaatccaggtctctctgagtccagagcccatatgcccttcctatctttgctactcatagcatagtcattgaaccagcatggtggatatcacttacatgcttggtagaagtgcacagattcacatcctacccccaggtctgctttttaacaagacttatgcatgcagtgagctatgattgcatcactgcacttcaccctgggtgacagagtaagatcccgtctcaaaaaacaaaaacaaaaacaaaaaccagcccagggattctgcacattatggcatgaaaagcgaggctatagagcatcctgctgcccttcttacccaccgtggcctgctgggcatacctgtaatcacacctggccatatgaaggtatgacatatgtcagccaatctctttttaaaattttaaaattttaattaatttattttttggaaggatggagtctcgttctgttgcccaggctggagtgcagtagcacaatctctgatcattacaatttccgcctcccaggttcaagtgattttcctgcctcagtcacctgagtagctgggattacaggcttgtgttaccatgcctggctgagttttgtatttttagtagagatggggtttcaccgtgttggccaagctggtcttgaactcctgacctcaagtgatctgcctacctcggcttcccgaaatgctgggattacaggcatgagccactgcacctggccttctttttcttcttcttgttctttttttttttttttttatttcaatcctgttccttctgtatttttttatttttattttttaatttttaatctatgttaaaaatctctttttaatctatgttaaaaatccagtagaaagccaggtgcagtgggtcactcctgtaatcccagcactttgggaggctgaggtgggtggaccttgtgaacccaggagtttgagatcagcttggtcaacacaacaaaaccccatctctacagaaaatacaaaaattagctgggtgtggtggcccatgcctgtagtcccagctacacaggaggctgaggtgggaggatggcttgaggaggaggttgcagtgagctgagattatgccactgcacttcagcctgggtgacagagccagatcctgtctcaaaaaaaaaaaaaaagaaaaaaagaaaaaaaaatcaaacagagaaataatgggtggcttaggagagagagaaaaacaggaaagaatgtaaatgactcatggagttgcaatggtataataaaaagctgaaaaattcaacataaatatgcgattagtgttctaatgcccagcatggtgataattctttttctcttttaaaaaatttgggatgcctgtaatcccagcactttgggaggccgaggtgggtggattgcttgagctcaggagtttgagaccagcctgggcaacatggtgaaacccgttctttacaaaaaatacaaaaattagccaggtgtggtggcacacacctatagtctcagctgctcagggactaagatgggagtttgaggctgcaatgagctgagattgtgccactgcacttcagcctgggcgacagagtgagaccctgtgtcaaaaaaacaaaacaaaacaaaaattgtggtttttgacaattatccacacagtctgaccatatctcctatatttctgtaatggggtgtgtgtgcatgtaggtgtgatggcaagttttgatttcttcacaaatccttcccagcactattaggatgacgtatttgcctgagagaactccattcattaccacctctgtctgcattgctctcagcttctctcttggttctctttggtgaccaggactgagagcttgagatttttcagaattcctaatacactgaagatgtgtgcaatgcactaaccatttgttatctcccttagaccaccagcacccctgtaaggatggcacaggccctccaatgctacggataaggagataactctgggagcttaagtaacttgccagagatcatgaccagagtcagaccatgactcagccacattgatgggcagctatgggtcagattcatttcaatctgtaagaccaaaacttgagcttgtgttgttttgttttgagatggagttttgctcttgtcgcccaggctgtagtacaatggcgcaatctcagctcactgcaacctccgcctcctaggttcaagcaattctcctgcctcagcctcctgagtagctgagactacaggcgtgcagcaccacggctaatttttgtatttttagtagagatggggtttcaccatgttggccaggctggtcttgaactcctgaccttaggtgatccacccgccttggcctcccaaagttctgggattacacgcatgagccactgtgcctggcctggtcttgaacttctgacctcaggtgatctgcctgcctcagcctcccaaagtattgggattacaggcgtgagccacggcgtctggccatgagcttgttttttttttttttccaggagatgttattagtttgactcttattttttttccaactgctgaagtttctccaaattctgcaaacatggcttaaaattaaaattgtcccaacccatcttatgtattcctttttatgtatttatttatttttgagatggagtctcactctgtcacccagggtagagtgcagtgggatgatctcagttcactgcaacctccgcctcccgggttcaaatgattctcctgcctcagcctcctgagtagctgggattacagatgtgcactgccatgcccagctaatttttgtatttttagtagagacagggtttcaccctgctggccaggctggtctcgaactcctgacctcaagtgatctgctggcctcggtctcccaaagtgctgggatcacaggcatgagccactgcacctggcccatcttatatattctgtcctattgacagacctgctattacatgaagtcccaattgttgacttcggaaaacgctgagttgcacgccatacacagaggctgggattgaagtgagacagcagagaaagccagcaatggggctactgattggtggtgggactctgcttgacatcatttaggttctttagacctcagtttctctccccgcaaaatgcaagtaataaaaaataatgtccctagctcacgagagtctttgcaagctttacagagtggtcagctcgtccatggaacataaatatctattcaaagggaatggaagaaagcattatgcatagacttttacacttggaggaaatggccaaccagaaaaatcatttggggccagagtgttgtatttatgtgcatatgcattgttgcattaaagcatttagttctgctccgtgagtacgtaggaaatgaatactctatggtctgtggtttccacacaggaaccttcaaagagactgttacactgacgtggccctccctctttatgaaaacctcaacattgtggagcagccggtgaacttgagcagccttgcccagaagtatgctgagaaagcaacccagttcatccagcgtgcaaggtgaggagtctccctccctccgcagggcctccccctgcctccacctacccgtgcacacacaccatgtcccttggcctcagcacgcttgaggccatggcagagttttgctgctcagcagagatggatgcatacatgtctcctataagtaaagctggaaaacagccccttctggaaatctgcggtcctggattagagattcctcaggtatgttcctagagtccctggggcttatccctctgttgctttgatcacgttccactgccatgatcattttgtcctctccttctagggtacgagctcctcaagggtagggcctgcccactgcactctgggcactcaaggcatttgttgagctcactagctggcaggatgtattacttttccattgctgctgtaacaaccaaccactaatttagtagctaaaacaacagtaacttaccctgctacagatctggaggccagatgtctgaaatgagtcttagggggctaaaatcaaggcatcagcaggactgttttcttggggagtctctagggaggattccttccttgccttttccagcttctggcatttctgagctatggccatatcattctcaactctaattctgttgttcacttgcatcttcagtcaaatctcccctctggctcccacttacgatagcacttgtgatggcgtttagggtccaccaggagaatccaaggtgatccccctacctcaagacccttaacataattccacctgaaaactctcttttgccatataccgtaacattcacagattccaggaattagaccctgcttatctttgggagctatccttcattctaccagacagaagttacaaattcccgcatctagaaggcacagataggtaaccttaaagagggaagcaggatgaacgtaaggcattagggagtggtggggtctacagtgaacctgtaagcacatgccccatctgaagggggcagctactacctagctccagctgcttggtgcttctttgtgaaaatgtgaacctggaatatcacatcttttcattttacaacagagataggatacctggcttttatgtgaaatctcctgatcttgaaatattagaaactactaattaacaaaaggctgggggtggtagctcatgcctataatcccagcactttgggaggccaagatgggcagattgtttgagtctaggagttcaagactagctgggcaacatggtgaaactctgtcgctacaagcaatacaaaaattagctgggcgtggtgatctgcacatgttgttccagctacttggtaggctgaggatggaggatcacttgagcctgggaggcataggttgcagtgagccaagattgtgtcactgcattccagcctgggtgacagagcgagaccctgtctcaaaaaaaatataaaatgaaaaataaaataaaataaaggtaaataagaaaaacaaagaagtgggctgtgtgcggtggctcctacctgtaatcccagtgctttgggattacactgggtaatcctccaggatcgctcgaggccaggaattccagactagcctggacaacctggtgagaccttgtctttacaaaaaattataaaaagtggctgggcgcggtggctcacgtctgtaatcccagcactttgggaggccaaggcaggcagatcacctgaattcaggagttcgaaaccagcctgaccaacacggtgaaaccctgtgtctactaaaaatacaaaaattagctgggagtggtggcacccatctgtagtcccaactattttggaggctgaggtaggagaatcacttgagcccgggaggtggaggttgcagtgagcccagattgtgccaccgcactccagcctgggcgacagagcaagactctgtctcaaaaaaaaaaattaatacaagttattaaatagctgagcatagttgtgtgaatctgtagtgccagctaactcgggtggctgaactgggagaatcacttgagtccaggagttcaaggctgcagtgagccataatggtgccaccgtactccagcctgacacatggagagcctgtctcttaaaaaacccccaaaaccggctgggcgtggtggctcacgcctgtaatcccagcactttgggaggctgaggcaggtggatcacgaggtcaggagatcgagaccatcctggctaacacgatgaaaccccgtctctactaaaaatacaaaaaattagccaggcgtggtggcggacgcctgtagtcccagctactcgggaggctgaggcaggagaatggcgtgaacccgggaggtggagcttgcagtgagccgagatcaggccactgcactccagcctgggcgacagtgtgagactccatctcaaaacgacaacaacaacaacaacaacaaaactaccccaaaacccaaaaaacaaaaaagcaaaaacaaaaccataccacagtctatctctaataaatcatatacgtgtgaggtgtcagggcaaagaatggacattgtgaaataatggacaactccaaaattgtgcacacttatttggaatgcacacccatagactgtggggtgcaagtgcacacacacacgtgtacctgcacacatgcacacacagtcaccctccccgcccccttcataactgccttctgctgccctctaatgaccccatatatgttcatcttatcttcctcctaggagattccactcctcaagggcaatggactccaagaaacttggtgttttctacagccttagcctaagtggtcaagaaagcacgtgctgcacggctgtccacttgggcagaattaaaaagggactctacctgtggctaagtgatcacagcagccccttgaatatgcaggaatcccccacccctcgctcagccacattggacgtttttagaagctcagcagggagggttgaggcagcaatgcaggagatccaggcatcctgttttcttggtaataaaacctatttaaggattgaatctcaaaagcagctcctaagggcttcagaaattgcatcttaagggtttatcaggactttctgagaacactgttgttttatttcagattgtcaatagtagaaagggcagagcctcttctgccatctggagggttgagcgtctcccagctccctggaactttgggatggtttcgggcccctgtgccccatggcacgtggatgcttcaaggctagtggggacagtctcttctgcttttgtggtgactcaaacgacactgtgttcttaggggaaggaatggggactcggggccgtttaatgccccctccgaagtgggcatagggcctggacatccacccgttaattaatccattaaagggcaaatcaaccgacagcctccttattatacaaaaaaggggaacagttttgttaattcattagctggttattaagtgaaaagtcccgagtcctgttggcatttaacatcacagaaggaaatccccagaaatgctgatttctttgggatttccacatgccaaatgattttctgagcatcagcagaaaaggccctcaggtccatgcccttcctcctccatgactctggcccctgcctcaagcccctcccccaccttggacctgtttttcaaaaccaccagctgtccctagagtgtggcttcccgctcttccttgacaagggggcccaccctgggacttagggagtttttacttgggtctttagttggctttagtgtttcacccaagaccctcgacgtagtacttggttatcactgctggtcattcagtttacttgactttagacccttcatctggtagcaatgctgaatgctaatgcttgattggagttttttaagcagcaggcaaatctctgaatgggaaaaggagccggtagaaggcatgactcctgggtcacagagctagctgggcctctgttccttttgaggtctgggaccgtgcattgcacctacgcgggcaatacagggcttgataagcaggagtgtatcgggcatcaggatgagcagcggcccagcatgtttgaaatcagacatttcttagttttctttttttgagactgagtctcgctcttgtcacccagactggagtgcagtgttgcaatcttggcgcactgcaacctctgcctcctgggttcaagcgattctcctgcctcagcctcccgagtagctgggattacaggcgcccgccaccacacccagctaatttttgtatttttagtagagacggcgtttcaccatgttggccaagcttgtctcgaactcccaacctcaggtgatctacctgcctcggcctcccaaagtgctgggattacgggtgtgagctaccgtgcccggcctgaaatcagacctttcaaacaaatcaatcttccatggtgtcatgtactacacattgaaatcctaacccttaatggggtggtattaggaggtggggccattaggaggaaattaggtttagataagatcatgagagtgaagcccccatgttgggattagtgtttgtattaaaagaagagaaagagactctggtgtgctctctcctggccatgtgaggatacagtgggaagacacttgtctgttaataagccaagaatcagccccttaccagacagtggacttcccagcctctagaactgggagacgtaaagtcaggcgtggtggctcatgcctgtaatcccaacactttgggaggccaagggtaggagattgcttgagctcaggcgttcaagaccagtctgcacaacatagtgagaccacccccatctctacaaaaaacacaacaaaacaaacaaacaaacaaacaaataggtccttctgcagtctagaacctggaaaaagaaaaaaaaggccaggcacggtggctcacgcctgtaatcccagcactttgggaggccgaggtgggtagatcacatgcagtcagaagaagttcgagatcagcctggccaacatggtgaaaccccatctctattaaagatacaaaaattagccggtcatggtggcacatgcctgtaatcccagctacttgagaggctgaggtaggagaatgcttgaacccaggagacggaggttgcagtgagccgagatcatgccattacactccagcctgggcaacaagagcgaaactctcagaaagaaccatgacaacaacaaacaaacaaaaacaacaacaacaacaaaacccaaaaaacagaattgggagaagtcgatggttgtatactaagccaccccagggagtggtattttgttatagcgtccctagcaggctaagacacaggacacgcatcttttggaactaggtcctcaggatgcagagatgaaagacatgttccagccttcatgagctcatgcctgggatctgcagaattctccgttttccttgactcactatccgtcttcattgctggcccccatgcttgcctaagtgcccctgctgtggtgctgccccctcctcatcttgcctctcacccggctcccacccgacaccaacctatgtcagggatccaggttcagatccaaagaccatactcacccccaacccctctttctcctttctcctgtttgaatgcagagacggatctctagtgagtgagagaataaactaatgactagcgaggcaatcatatcgaacgtctcccccagggctatgttctctgccttgtgtggtcaccacacaccgtcctccaggtcccactgtctcagggatctttccctcccctccacaccccaaaccccatttggttcccctgttacaccttccacagcaacttgtatttctcttccatctctcctacgggctgagtattccgtatctggaatgcttgggaccagaagtatttcagattttggatttttaaagagtttggactatttgcattatacttaaccggctgagcatccctaatcctcccatgagtatttcctttgagtgtcaggtcagtgctcaaacagtttcggagtttggagtattttggattttcagatttgggatgcgctgcctatactaactttttaaataatcatcttatttatattttagttgcctttttctctttcctggtctcaattagatgttaaactccaagagggtggaaatcatatctattgtgctcattcctctgtccccagtgcccagttagagcttaataaatatttaatgaatgaatgaatgaatgagtgagttacttatccagctccagtgatgtgctggtgctgtgccagggattcaaacgtgaattagacatgtccagtctctgagtgattcccaagctagtggggaaacagatatgtaaaaacatggctttaatgcaggttgtttgtatcttattaataccgcaagaagcagggaaaagggctatggcagggatgggggcagagaggaggcagccaaccatgacctgggagcaaaggaggaggactattggtggctttggaattggatcttaagaactgattaagtgttttggggcaagataacagggagaatactgctgagagaggaataacatagatgaggcacaggaagtaggtgaggtgcttgggacactggcatatagaaagagtctttgacagggaaggaaggtcaggctggaagggacggagatagggaaagctgcaaagactgggtgaggagtttggattgaccctgcaggctgcaatgagccctagtacgtttcttttgtttctttcttctttcttttttgagatggagttttgctctcgttgcccaggctggagtgcaatggcgcgatctcggctcaccgcaacctctgcctcccaggttcaagcaattctcctgcctcagcctcccgagtagctgggattacaggcatgcaccaccatgcccagctaattttgtatttttagtagagatggggtttcttcatgttggtcaggctggtctcgaactcctgaccttaggtgatccaactgcctcggcctcccaaagtgctgggattacaggcgtgagccatcgtgcctggccgagccctagtacgtttctaaatagagatctgccagatcaagtctgggttagagaaggttgtctgtgatgccagggtctagtggaagatggcaaaatggtggggcgggggacaagtggttattgcagcagtccatttcagagagaccccttgcccatccatccccagggagccaccaccagagaggccagtgggctgagagctgcaggtgttcatttccccctgcatgagggaagccctgccttcacctccaggcctgcctccctccacccaggcaccatctggggacacttcttgagagatgggtgcctctcacctgccctcttccatttcggatcagatgattttccccagccttaacggtccctgcaccataatcttctccacaccctgtctccacaccctgccccatcctcttgctctcctggaatgtcccctctgtcatcttacttgtttttttccttctctactcaccattccacttgttttcccacaaaaatagcatgtgttccctttagtaatctcggaaaactgagacaagcaaacaaaaaaaaatcaccctgaattccatcccagagataacctgttttttgttgttgttgttgttgttttgttttttgtttatttgagacagagtcttgctctgttgcctaggctggagtgcagtggcacaatctgggctcactgcaacctccgcctcctgggttcaagccattctcttgctggctgggattacaggcacgcgtcaccatgcctggctaatttttgtatttttagtagagacagggtttcaccatgttggccaggctggtcttgaactcctgacctcaggtgatccacccacctcggccttccaaaagttctgggattacaagtgtgaggataacctgttttaatacctccgagtatgttcttctagcctcattctatgctggtgcataaacatatgtttccctggttttattaaggtatagttgaaatgaatgtgttttagaaaacaaaagtggagtcacactgtgatataatcagtatttttttaaagcatcaggtgtccccccactctattttccattcagcacaggtgcataatgaagaggtggcttgcgggacagatgcccccaagggactagtctgtgtgggctctgcctgatgccatgttttggaatctagcctggcatcaggatgcagggagagaggtacatccttgggcatcatttatgcttactactgctggcatgtattcaacattcttaacaaggaagcggtcgggcgcagtggctcatgcctgtaaccccagcactttgggaggctaaggcaggcagatcacttgaagtcaggagttcgagaccagcctggccaacatggcaaaacctcatctctactaaaaatacaaaaattagccaggtgtggtggcgtgcatgcctgtagtcccagctactcgggaggctgaggcaggagaattgcttgaacctgggaggcggaggttgtagtgagccaagatcgcgccactgcactccagcttgggagacagagcgagactccgtctcagaaacaaaaaacaacaacaaaataagctaccatttattagatgcttagtgtgggaagttacacaactttgttggggaggtctgattgtccccattttatagatgacagaggttaagttaattgtccagggctacacagtcatgaaataacaaatctggaggtttggatgcaggattctcaagcctgtgctcttcatcagcctgtgctctgccatctctcataactgcctgtctctgtaagcctctggctcagggtgctaatgtgactttgataatgggtgagagtttggaagatgatgatggatgatgaagggtggacagcaggaccacccctcgcccatacacatggtgagctgatttctaagaaaacagctgcagtctgtagcatttgccaattcctgaggtgtaaatactcaatctcaccatggctgatttccagctatggagatgtcaccgaatatggcattgaaaaatgatgggcagtagcaagccattgtgtgttatttccaccacacagatacaatagatgtaaataaccccatgagcctacatcatagcagaatgtagtagttgggaagtgataaatggtgagaatgtactactttcaaaaaatattattgatttatttaatttattttttttttgagacagagtctcgctctgtcgcccaggctggagtgcagtgcacaatcttggctcactgcaacctctgcctcctggtttcaagtggttctccctgcctcagcctcccgagtagctgggattacaggcacctgccaccacgcctggctaatttttgtatttgttagtagaggcagggttttgccatcttggcccagctggtctcaaactcctgacctcaaatgatccgcctgcctcggcctcccaaagtgctgggattacaggtgtgagccactacgcctggcaaaaaaataaaataaaataaaatttatttaattgtggacttttataattgaatttttagcaatggccatgtttaacaactggtttgcaaaatacttgaaatttgagccagatctaggcaccactgcaatatggaatctacctgaaaattaaaaaaagccacccccactggccaggcactgccctgtgcagggtaaccagccagtagattgtaagctggaaataaggacccattcactcagcaggatgtcctgatgcaggccacaacctgcacaactgtacatgaccatccctgggagagttggcatcaggcactgcaaatcattgctgtacgaaaaaactaggcaagaatggagatgttttctatctgcactgtccaagctgctagcctctagccacctgctgctgctgagcatttgaaatgtggctaggaatttatgtatgtgtgtgtgtgtgtgtgtgtgtgtgtgtattttattgtgggtatgtatatatacagatatatataatcataaaatgttaccatcttaaccattttaaatgtaaagttctgtcgcattaaacattcactttgttttgcaacaattaccactatccatcttcagaactgtttcattttttctaactgaaactgtacccatgaaacataaactgcccagtttttcttccccgcagtgccccgccactcaccatcctaccttctctctatgaatttgactattatgggtacctcacacaagtggaatcatacaattatttgtttcttggtgactggattatttcacttagcataatattttccgggtccacccatgtgctagcgtgtgggccatggaacttttaatatgatttaattttcattaatttaaatctaaataggtacatgtgacttgtggctgctgccctgaacaacacaactctagcaatgttgcagagaaagtgtggattaaaatggggaaggcagacgcccctgtcttgggacttgtgtccagggttttatgcatagcaaagagaactgagtgcaagcacagtcccaggcggcagaccctgggagccagggtgcaggggggatttgagggcacagttggctatagagcaaggctgtaaggtggtgtaaaccagggtgagctaaggagaaccctggggccaactgaatctctgcgtgaactagtatgaaagggccatgcatctacccccaccagaatgttgttgactctgtactctcccaatacccttgtttggtgtcctctgaaagaccccccatggatggatctgtgggagaggggccccctgaaggtccctgccaccgttgtgattctgcagctgctcttggctgggagtaggactgggacctttgcttggaagccacgccagctccctccaagcctttcattctgcactttccagggaaatcaggatgagtacagaggcagccgaacaacaaggcctctgacagatccctgatctagatgttacctggtggtcatatgtgtccttgaaattcctgtgatcaacttgagacaaccatttatctcttagaaaggaacaaggctggccaggcacagtggctcacgcctgtaatcccagcactttgggaggccgaggagggcagctcacccgaggtcaggagtttgaggccaacctagccaacgtagcaaaaccccatctctactaaaaatacaaaattagacgggcatgggggtgggcacctgtaattccagctactcaggaggctgaggcgggagtatcgcttgaacccaggaggcggaagttgcagtgtgacaatatcgcgccactgcactccagcctgggcgacaagagtgcgactctgtctccaaaaaaaagaaagaaaggaatgagaggctgagaatggacaggatagtctggatgctgcaaaataaaatttaaaggtgtgtgtgtgtgccttagactttacagtgtggcagttaagagcaagattcggacatgtaactaattgcatatcctgggcaagtcctttaatctctaagcttctgattcttcatctgaaaaacggggctatgatgaggacgaacctagacaatgtgattcccatataataagctctcagtaaatgataagggatagtaactgttattacaattctcatttttaattggctaaccagattgctttcacatttccttggaagattctggataaatgtgtccttcttgagcccgtggggcagaaggagctttggggattttcctggaggagagggaggatccctgaggcaccagatgagccaggagagccttctgcagagtcacctcttggttctcctgtttcagcaccagcgggaggcccttcctgctctatgtggctctggcccacatgcacgtgcccttacctgtgactcagctaccagcagcgccacggggcagaagcctgtatggtgcagggctctgggagatggacagtctggtgggccagatcaaggacaaagttgaccacacagtgaaggaaaacacattcctctggtttacaggtaaagtagtaaaagccagccagcctaactgccatttaatagacaaccttgcacattacctgtgaagagcagagtctggccccgtgatcccctttcataggtcaggaggcttgctttgaacttgtggcccagataaggcttgctggcctgaatgctgagcacctgtccattggggcctccaaggccaagtccctggaaaggtttgcacacacagagcagccaccttgctggcccgttgtgtgtcgattcaggctatctgggtattgctcttaattgccattgaatgacattgacattgtgagcctgtgttgtccctgtgcagttctaagatttccctcttctccatcttccctggtcccaaagattctacttgctgccactccccgtgtcacgtcttttggctgagtggccttagcgagctgaactagtggcctctttaaaggcctcacacatgcattgtgtattttaggtttctgtctggagcgactgcagaggttataagcactgcttttggccaggttgactcacacctataatctaataacagcactttgggaggctgaggcaggcggatcacctgaggtcaggagttcgagaccagcctggccaacatggcaaaaccctgtctccactaaaagtacaaaaattatctgggcatattggcacacgcctgtagtcccagctactctggaggctgaggcaggagaatcgcttaaacctgggaggcggaggttgcagtgagctgagatcgtgtcactgcactccagcctgggagacagagcaagactctgtctcaaaaaaaaaaaagcactgctttcgggtcaagtagagacttatactctctaccgtgcagtgaaggtgttataaactcctacagggtttgaatctatactctactattgggggaattcccttaatctctcagtctccttttcctcatctgcaaaattaagctaataaccgaatctactccatagcatgttggaggattatgagatgatgtatgtgaaacactgggtgcataatagatgctcaataaacagttgctgggctgaagctgatgacggtggcaatgagattgctgaaaccttacaaaaaggcaagagaggaaagaggaaggaagaggaggaaaggcaaggaaggcaagaggctcacgatgggactgggttggggcaggaaaaggccacctgtctctgaaagcccagtagagacacatctcatatcaagggttgttcttcacggatgggaatcatatttgtctttatttatttatatttatttatttttttagatggagtcttgctccgtcacccaggctggagtgcagtggcaggatctcgcgtcactgcaacctccgcctcctgggttcaagcgttttttgcacctcagcctacagagtagctgggattataggtgcccaccaccatgcccggctaatttttgtatttttagtagagaaggggtttcaccatgtcggccaggctggtctggaactcctgacctcaagtgatctgcttgcctccgcctcccaaagtgctggattacaagcgtgagccactgcactaggcccatgtttgtctttataagtcctttttctatctagttcctgctctgcgcaagggatatagggccagagtgggagggtcagcgaaagtgtccaaccagcctggtgaccattaatgctttttctggtttctaggagacaatggcccgtgggctcagaagtgtgagctagcgggcagtgtgggtcccttcactggattttggcaaactcgtcaaggtaaggggctcagctggggttggtggatcccattgcaatgctgagcccaggctggggtgtgggattctgcctccgggtgggggacaacttatatctgggccttagggtcatcattgtgaaacagggacacatttgctcaccagccaccagcacccagacaagaaggaacaagtagtggtggagaaaacgactgctcagtttggaccatccctgtctctcctttcctcctagaacttcccaaaggcgaccagccctccacccaacgagccagtctacctacaaacattccaacaaatgagctttgtctttactttcatcctgttcccttgctcttcctccttcctttttaaaacttcatccctccatccatctaaccattaatttatttcatccattcaaaaaatatttagtgtacaactgtacaaggtttttaatgtacattgtctccagttcttacaagagtgagagggtggcagtcatagctccatttacagatgaagaaaaagagaggctaggccgggcgcggtggctcacgcctgtaatcccagcactttgggaagcccaggccggcggatcacgaggtcaggagatggagaccatcctggctaacacggtgaaaccccatctctactaaaaatacaaaaaattagccgggcgtggtggcgggcgcctgtagtcccagctactcaggaggctgaggcaggagaatggcgtgaacctgggaggcggagcttgcagagacagagctgagatctgcactccagcctgggcgagagtgtgagactccgtctcaaaaaaaaaaaaaaaaaaaagaaggagagaggctcagagagggtaagtaatttgcccatgtcacacagtttgtgaggagggagccaggttttccactgaagttaaagttggtgctcgccctgttgtaccataatgcttctcacagctgcctctgtctctatttcaacatcttccaacttccaactcagctcccatctgctctgggagagctttgccacaaggacctcactttctgagactgcagccatgttggggacaatttgacatatggaccaaatgcttgaaaaatacgcatatcatttgatgcatcaattcctcctgtaagaatttgtcttaaggaaataattaggcacatgctcaatgacatacgaaaaaggatgctcattgcagtgaatttttttcatagttggacataacccaagtgtctagtaagaagatagtgcttaaagaaattattatacctccattaaaaggaataacaaagaaccactaaaataattcatatttattgacttggaaacatttacatgaaatatttttaaatgaataaagcaggttccagtatggaacaatatgtaaagtatgattttattatataaaaataatcacatgtagactcaaaaaaatcttgaaagagtcaataaagggtaacaaaacattagcaataattacctctgggcagcggagggagagttgaaggggtgaatttccccccacaataaactggtattgtttgtttcatataaattaaatgtttaggaggtatttgtgtccaagaggttcagaggtggacctggcaagtttaccctcattgagggatgtgtggggcagaattttagatctgggactgtgtattagtccacagactaatacacacaatcgcaccattcttgaattagagggaaccaaaaaggtctatctgtctgtctgtctgccagttctatctaactgtcatctatctatctatctatcaattgatcgatcgatcgatcgaaacaccaatactccaagagataaaataaactcacattgctataaagaactacctgagacagggtaatttataaagaaaagaggtttaattgactcacagttctgtaggctgtacaggaagcatggctagggaggcctcaggaaacttacaatcatggcagaaggcgaaggggaagcgtgtatgtcctacatgtttggagcaggaggaagagagtgaaggggaaggcgccacacacttttaaacagccaaggctaatgagaattcactcaccatcatgagaacagcaaagggaaaatccgctctcatgacccagtcgccttccaccaggcccctcctccaacactggggattacaattcgtcatgagatttgggtggggacacagagccaaaccgtatcaggctgttttccctgctgtcaaactcaatcctgacctatgaccctcagctgtctccaggaggtctccactagcactcccgtcatcgtattagtctggcaggataattgtagttacctagaaactgaagcattgtgcgcctcaattctggtgcagagaaggaaatgctgattttttttttttttttttttttttttttttttgagacagagtcccactctgtcacccaggctggagtgcagtggcacgatcttggctcactgcagcctccacttcctgggctcaagcgattctcctacctcagtctcccaagtagctgggattacaggtgtgtgccaccacgctcagctaattttttgtttgtttttttttgtttttgtatttttagtagagacggggtttcaccatgttggccaggttggttttgaattcctgacctcaagtgatccacctgcctcggcctcccaaagtgctgggattacaggcatgagccaccgtgcccggccatgatcatttttatttttcaatttttttttttttgagatggagtttcactcttgttccctgggctggagtgcaatggcatgatctcggctcactgcaacctccgcctcctgggttcaagtgattctcctgcctcagccttcctagtagctgtgattacaggcacccaccaccacacctggctgattttgtatttttagttgagatggggtttctccatgttggccaggctggtcttgaactcctgacctcaggtgatccacccatcttggccttccaaagtgctgggattacaggcgtgagccaccatgcctggcctacttttcaattttaacctattgtcccttggatcagatatcttgagaactttaggagcaagtggctgcaggactgtggccatatcttgtgtctggaaatttgagtcggggtcaggagagctgagtaccacctcccactaaccttttcagtgaccagattattttatctcttggagtattggtgtttctcactctcactctctctctctctatatatatgtatagatctttttggtcctcttcagttcaaaaatgctgtgatttagttgtgatttctggagagttgggtcaaaagaagatgctaaggaggactggaggtggatgggggtgtgtcaagaaacaggagccagccaggcgcggtggctcacacctgtaatcccagcactttgggaggccgaggcgggcggatcatgaggtcaggagatcgagaccatcctgactaacacggtgaaaccccgtctctactaaaaatacaaaaaattagccgggcatggtggcgggcacctgtagtcccagctactcgggaggctgaggcaggagaatggtgtgaaccagggaggcggagcttgcagtgagctgagatcgcaccactggactccagcctgggtgacagagcgagactctgtctccaaaaaaaaaaaaaaaaaagaaacaagagcctagagaaatacagcataaatgggagtggtttgttgcattagctgattacaattcctcctttctgtacctgggacactcttgggccaggctgtcatcttcagtgttcagttagaaagcctggaatagcctggtgtcagaagccccaaggctaaaagtccagaaggtgcagaaggtgtggagaccatggatgcagggggaaggatctgtaagtaagtggcttctccgtggggagaagaatttacctactgatctcctatctgaggacttgccttattgatctcttctctctttatgaggcagttttgaaatagtgagtcaggcttaaggatgtggactgggaccccattcttcgagggaatgatgagaaatacatttactagctggccaggtgcagtggctcatgcctgtagtcctagcactttgggaggctgaggcaagaagatagcttgaggtcaggagttcaagaccagtctggccaacatggtgaaaccccgtctctattaaaaatacaaaaattaaccaggtatggtggcgggcacctgtaatcccagctactcgggaggctgaggcaggagaatcacttgaacctgggaggtggaggaggttgcagtgagctgagattgcaccactgcactccagcctgggcaacagagtgagactcagaaaaaaaaaaaaaagaaaagagaaagaaaacagaaaaataaaaataaatttactagctgggcaaccaccatctctcctttccttccttcctcctgtaagcattcgttgagtgcctactgttttctattcctcctatttgttgagcacctactgtgtgccaggaactatgcttagtgctggtgccacaaagatcaacaaagccccagccgcaaggaataatagtctagaatagtgtttctttgattttaatatgcagacagtcccctggggatcttgctaacctacagttctgacccaagagggctgggttgctgatgggagttttgcatttctaaggttctcctaggtgacgctgatgtggttggtccagggaccaaactttgagaaccaccagtccagaacatctacatctagaccatgagtctagaatcatctgagtgtagaactttcaactttagaccaatggttatcaaagtgtggtccctaaccagcatcattagcaccacctgagaaattgttaacagtacaaattttagggcttcaccccgggccaaaagaatcagaagcactcaggatgggtcccaggaatctgtgtttaaacaagtcctttgggcgataatgcaggttaaaatttgagaactacctgtctagagctacacagtctggtatgtcaggcactagctacatatagctatttaaattaaaattaatacaatttaattaaaattcaattccttggtcacaccagccacacttccagggctcagtagccatatgtggctagtggctaccatattgggtagcaaataggcttccctgggggtgatttgtgttttgaagaatgagtaggagacagccaggaattggcaggagaagaggctctgggcgagggcagcagcccgggcaggggtgggaacatcggggagtaggagccgctccctagagctgcccctgtgtctgtgagtctggagtttgtggcgaccaaggagaatagcgagagatggggccagcgttcaacgatcttttcagtttggcttttattttaaggaaatgtggaaccatgggaagattttaagagtgggagggacattatttaatgttaaatatggaggtgaaatttacatcacataaaattaacattttaagttgttcagttaagtagcacttagcaccttcccaatgttgtgcaacgaccacatctgtctagttccaaaacacttttatcacctcaaaagaaaaccctatatcctttaattaattaattaattaatattttagagatacagtcttgctctgtcccccaggctggagtgcaatggcgcgatcatagctcattgcagcctcaaactcctgagctcaagggattccccccacctcattctcctgagtaccttggactacaggagtgtgccactgcgccccctgcatttttttttttttttctgagatagggtcttgctctgttgcccaggctggagtgcagtggcatcattacagctcactgcagcctcaacctcctggattcaagcaatcctcccacctcagcctcccaagtagctgggaccacaggcatgcaccaccatacccaactaatttttctttaccttttaaaattttttttgtagagacggggtcttgctatgttgcccaggctggtctgaaactcctgggctcaagcaatcttcccaccttagcctcccaaaatgttgggattacaggtgtgagccactgcacctgtcctatgcctagcttttaaaatatatatatttattttatttaaccccatatcctttaaacagttgctcaccatttcccactccccctccagcatactattcaatttttttttaaaagatccctcttatatcaggggagctgagaacaaggagaagggcaagtaccagcctcatttccactgatccaaaatgaccaatgagagaagccagtgacaaaatctccaggaatatccccaagttcaaagaacgccaaagttggaaaagacctcagtcatctttttttttttttttgagacaaagtcttgctctgtcgcccaggctggagtgcagaggtgcgatctcagctcactgcaaactccaccttccaggttcaagcgattctcctgcttcagcctcctgagtagctgggattacagacgtgcaccaccacacccgccaccatgtctggtatttttagtagagacggggtttcaccatgtcggccaggctggccttgaactcctgacctccagtgatctgccctcctcagcctcccaaagtgctgggattacaggcgtgagccaccgtgcttggccgacctcagcgatctttattccaaccaccttattggacaaatgaggaaactgaggccaaggagaatggaaggcatccccgaggccagccagcaatggaggggtccacatcctctgaccatcactggctcattctccaagtcacgtgactgctctcacgcacaccttgttatactcgactcctcagccacctggaaaatcctatcttgctctttgaacctagcaattgtcaaggaaaagtctttagcccttgcaacagtctgaatctttctacatcggtgggaggcagagagggtttggaggctcaggctgggcttgaatcttgactcagctcagggctcagcatcctcttctcattaggtggggttgtggaccattctccatggactgttgggagaatcagtgggggtactgcccaggaggctcccagccttgcacctggcctctaatgataacccccattagactaaatttcttcattcctggctgaaacaacctggcggaaccccacccatagaagcattagaaggggattggcaaacaccctgaaaaagattcccccacaaaaggatcaggcaacttaaatcgcatacagataactttaaaagtgttcaggaactcttgggaaactttgttctgaagctgaatttcaggcacctcaagataacattcttttttggggcaaggccttcccagtaactctgatgtgggatcggtgggtgacagcacttgaattcatgatcgggctggggctggatgccattgccctcttttcttgggagtctgaaagtgaactttgcctgaaaggctgctgcctgggggtaaatacttcttcttcctcagtctccaaagcggcttcctgtcaactaactattccacagcctccttcttcctctctgcctggaatgctgctggagctctgggaagccaggcagcgccctgctcagcaggtggccatgtcctgtgagtcaagggggctggggtccctctggtcacctgctcctcttcacccagttccccatcagtgggacatctgcacggctcactgtacaggggccagactcaagagcagatgaaagagagaaggcggtcaatgttttcgcaacggagtaggacaaacagtacccggagtcgtgcaactttctccctgaagccaggctgctgcgtcaggccacgtgctgtcttcccctgttctcagggcccccaggcccccctgcttgtcttccctttcctttcctggccgagccgcccagctcagctgatgggatgaggcagcgtctcctggagtcatcttttcaccccgtgcgtgtggactgagaatgctccacttggcttgtgccctgcaggggtgaggagaaacggaactggggcgggggcagagcaaagcagccctgccttctcccgaagaagaagggcacgagtcagacacccctgctgtctctgagtccacagcctggtccaggaggcctggctctcccagcagccgccttcccttctccatgccagatctgtttcctacccaggacagaaccaacaccttgtttttcccctaactgactgctcctctgtctggaaaatcttttctcgttttatttgaagagcagaactgttccttcctcccccttggtgatgaggaaacattctgttgaatttggcatccaggctcctaggagaccttggttgtttgtaatttgatgctatcaggttgttgcataacctttcccgctgggaagcagtctctgcatcctgggccttctgtccagtttggggtcgggggtggggcggggaaaagtcagaggtgctgtgaggtgacagagcaagggataagggactctggctgttggccctggctggggacagggcctgctgatagggacctagaggaagtcaaactgcgtctctttctgggcctttggccaccaggcttggtggaatgtcctcatcccatactcagggccaccccaggccagccggagtcctgggtctgaatagaggccaggccgccctgtgtttctagaaaacgagtacactgtaggcatccttggcaaggggacatactacacttagaaacaaagcctgcttctttattttatttttgtagagacagggtctcactctgttgccctggctgcagtgcagtggtctgatcatggctcactgcagccttgacctccggggctcaagcaatcctcctgcttcagcctccctagtagcttagtagctgggactgcaggtgtgtgccaccatgcctggaacactacaatttttttttttttttttttttttttttttacagagatggagcagaggggtcttgcttgttgcccaggctggtttcgaactcctggcttcaagtgatcttccttgcatcggcctcccagagtgctggtgttacaagtgcgagccactgcactgggctgaaagcctgcttctttagaaggttattagaatgtgcactcctcagaacaggcactctacccagtcacaaatgctaatgcctttgtgggccaggcaggtgatataaaggaacacatgtttgtttttgtcagttatgggcagtgttaggaattcaatatgctggagagaggaccctgtcgaatgacattcagcattagttaaatgaaaaacactaggcatgcccaaccaaactgtcggaggttgtgatctctgctattttctccctacaggtaatttggttggcacttctctggcaggcattatgcaaaagtaccttgcttgaagctttatgtacactgtcttatataactgttcccacagccctgtgagatacgtacaactgacctttgagcgacacggatttgaactgcatgggtccacgtaatacatgaattttcttctgccactgccacccctgagacagcaagaccaacctctcctcttcctcctcctcttcttccttagcctactcaacgtgaagacaacgaggatgaagccctttatgatgatccacttccacttaatgaatagaaaatatattttgtctttcttccaattttctttttccttccttccttccttctaccttccttcctccttccttccttcctttctctctttctttctttctttactcttttttttttggacagtcttgctgtgttgcccaggctagagggcagtgatctaatcagagctcactgctgcctcaacctcctgggctcaagcgatcatcccacctcagcctcccaagtaacttggactaccagctaggactcccaagtagctgggactaccacacttagctaattatttatttatttatttatttagtagagacacgggtctcactatgttgcccagtctggtctcggactcctgggcacaagccatcctcctgtcttggcctcccaaagtggtgggattacaggtttgagctactgtgcctggccaggattttcttactaacattttcttttctctagctcattttattgtaagtctacagtatataatacatgtaacatactaaatgtgtcttaattaaatgtttatgttattggtacggcttcctggtcaacataaggctattagtagttaagttttgggagagtcagaggttatgcccagattttcaactgcttgggagtcagtgccctaactcttgtgttattcaagggtcaactgtacaatcgtttccctgcttcctggctgagatgattgagactgagggaggttatgaattctgcccaagaccacttggttggcaggggtggcactggagacctgcctgcccccaaaggcatcatcctaattattccttgaatacttcttcaactctagttttcaaaccactgacatcagaattacctagaatcagagccccaccccagacttattaaattagaattcctgggaataggacccagaaatccatgtcttagatgagatctcatctggtgattctcttgtatggagaaatttgcgaatttccttgtttgctgcattgcctttctgactcagtgaaacatggcccttgggtcccagccaagaaagaccactgttcctccgcgtgggcagtggtgagtcttccccggcctgcccctgtcttcatgcatcataaaatgccacttcacttccgtaaccagagaagcacaaataagcaaattcatgaatcatggttttgttgatattttggttgctgtggctaaatatttattgctttaagaggttctgctttaattagagtcacaagtaaccacaagtgcgtagaaatgcattctcatggccataagacacgcatttctcgacagaaagccgaaggcaactaacagttttaatgtgccagtgcctgatcaaagtatggaggcttatctaaatgaatagtgtttgaaattgaaaagtgattagaagtttcatttatggattgtctattgttcttactatgacttataaggtcatatttatgatgctatggcatagaggtataaagtcgtgggcaacagaaagcctgcagtgacgatgactattagctacatttaactttgaaacgtgctgtgttctcttcccgatcttgccccttgccctccttccctgggaatgagtgctctccccactaaatccccaggagggttttagaagatattgatgtcagagcttcactgcaggtcgattaaatcacagtctctgggaaagagactttggcatgcgtattttttaaaagctctccagtgattctaatacatattcaaaatggaaccacctccctaggtttagtgagtgagggtgctggctgtgtagtcagaccggcgttcacatcttggctctatcattttctttctttcctttttttttttttgacagagtctctgtcgtgcaggctggagtgaagtggctcaattttggctcactgcaacctccgcctcccgggttcaagtgattctcctgcctcagcctcctgagtagctgggattacaggcatgcgccaccacgcctggctaatttttgtatttttagtagagatggggtttcaccatgttaggctggtctcgaactcctgacctcatgatctgcccacctcagcctcccaaagtgctgggattacaggcgtgagccactgcacccggccggctctatcattttctagctatgtgacttgggggcaaattacttagcctctctgagctttggtttccccatctgaaagatggggacaatagtggctaacttgagaggttgtcataaggattcaatgagataatgccaggaagcatgtatcatgctgaggagcacttaacttggtacttagtaagggctcaataaatacgagatgttattgttgttgttattactattatgtttaacttagaataactatccattagtgggagcaggtattactgaagaatattgggggatcaggagtagctatcctagaatttagcctttgctggtgcagataaaacacaacacgcctgtttgatataagcatatgcatctcataattagagtacacaatcctaggggccgatagaatgccagtcagatctttgtaagttttgtccactcctagcagtaccagtgagaagctgagatttatagcaagacagtatctgcgctgttggtgacacataaatattttacaattgcctgttcacactctagacccttttaagataaatccctttagaatacaaggtctgtggacctgtgatcatttgggtggctggcatatataattgtgtcttcctgttagagccagaacccaggatgtagcctgcactaaccaactagtctgtacaacaaaaagaggggattgctccttaagtggccacactgagaggcttctctcagccaatctttttctttctcctaattcctgaatcttttgcaaggagattgtctgctttgttgactacacctgttttataactagctggattcctccaaacccctccagctttcagtcctttgctgaaataagacaagcacattgaaacgtttttctctgaagagcgtattaggaaagtcagtcacctacaagagagcaacacaaaaggttgtggcaaacgagaagaatccctaattcttgaagggatccctaattggtgaagaccaattagcaaatttattaattagaccaatccctaattggtgaagaccaattagcaaatttattaactaaaggtcagtttacccttctggaaacatcctggaggcagagaccaaatcctgtgttcaaccctggtgccattgcccaccccagtgccttctggttgaccgatagagctaatggcttgtttcctggaaccacagccgtgatctttccttagcatctggcctcaaaggttaagcaagactatttgaatagtgtacaccatggacatgcagataaacaggctccccgttttcacccacccataccccaagcttccacaaagatgcccccacgggggtggaagtatctacaaagccctggcacatgcctttgagcggatgcttcctccctgccctttggccctaagctgacgcataagtcatacattccaaagccacgtggaaatgcgttttatgcttgctggagttctggattctttgttccaagtgcgtgaataaattggagggagctatatgtatttatgggagacgtggccctcgataggaaggatgtattagagaaatgctgggctagatcaaagagcgtctcattcagcctgcagagactccagttagatttttcaaccccacacccttaaacataaacagtccataggacataagttattttgtgttttgtttcttacttcaaaacttgagggactccaaagctgattatgaaagagtcctaagaatgctgagcatttcccgtgtggtgtgctgggccagggacatcaaaggttccgtttgcaacagtgctagtacagggcgacagaagccttcatcttcttcctccccacgcttctccccacataattgctttcattattcacaccagccaaacaaagggaaattgcatgaccacagtgtgtgtgagccacacacagcacttgccttggaaaggctgtgcacacgctaactttgtgggatccttggcccttggctcaaccaggatgagggtggggtgtgtgtgggggtggtgggatggccgtggttaatgcaacccaacatgtattcaggatgtttccatcaagcatgacctcatgtcttccagcccgctagctatcattatactggtggtcacttttgacttaatggttacaaaaataattcctttaataaccaaggtggaaattcatagattgcacgtagttgtttcttacctcccccaggaggcaagaggttggaactattactgacactgtctccataacatcagaacaactcatgaattcaaggaaaaacaaagcaaagcaaaacaaaataaagccataaaatccatgccagatcggttcttggatgttgagcagatcaaatagctgcagaagtttccttctttctctcttctttaatagttgtatttcttcatcctaaacagacagtcacattatgatcaccaggaagagaaattcacttactcaacaaagatttgctaagccccactatgtcttaggtgcatgagactgatgaagtctcatggtgttgagacacaaaacaagcaaatcaataaatgaaaaaataatttacagtggggaaggtctcatgaagaaaataaaatgaggtgattcagtagagtgaggcaactttttacatctgaagtccagtaaaataaaaagcatattttgaaagatactagctagttgagggaaatagctggttaccaaaaaagtcattcctttgttggggttattggaaactcagagaggggttctcccagagactagctcttagctgaaaagaagtctcgagttatcaccatggatgaaccagctgcctcccctcctctcacagggggaagtccagccaagcagacgacctgggaaggagggcaccgggtcccagcactggcttactggcctggcagagttccagttaatgtcaccagcactgccttgttaaggtatgagaccaaaactaccttgagatgttggggcccagagcaagaaaagtcatggaggcatgggtggctagatggaggcatgggtggctagatggaggcatgggtggctagaggcctcaggaaggtcattcaccacttgcctttgccgggtgttcccagacacttccaagactctgactgtagaagtgatgaaagtaatagtgaagtggggccacgtgtggaggctcgcttctgtaatcctagcactttgggaggctgaggcaggaggattgctgaggtcaggagtttgagactatcctggtcaacatagcaagaccctatctctaaaaagaagggaagggaagagaagggaggggaggggagggaagggaaggagaggggaggcgaggggaggggaggggagaggaggggaggggagggagaaacagtgaagtgggactcgagccatcttctgggaataacacctgagtgaagaagggattggttggtttcacatacatcagcattgggtcctggctgtgtctgctggagagagtgcagaaaaggcggcagcagcagcatctccctctcagcctgtgccaagctgaccgaggcaatagatcctttgagacctaattgttccatccttggggttaaggcaggtgtcttaggggtggctgtgagaagccggctagtctctagcaatccgatggccccaagaaaggagtccagatgtccactttccctggaggagggtggagaagaaaggtggcccctccaggccattagggaaataatgaatccttaggtgaagacattcctcctgcctctggccatgatgcttcttaatgagctgagtgtctgcatagctcactgcagacccatcacatcaggtaaatgtgatgtctcaccattattcttattgccgccttaaggcagatccaggaggccatctccatggcaaagaacttggctgtgcagcgtctatgtgaaaacaacatcttcccagctatggaaccatgacttatcctggggacttttcactaattcagacaggaccttcctctctgtgttctgccctgtgttcactaacaaggggaaccctccgtagaaccctgtgctcattcatgtgctcagaaaactgctggttaaagaccgatttcctaattccaaaggttctttgccattagcctaatgagttctggcgtaaagaacacagctgagtagaggcaggcaagcttcattggcaccctctgacttccctagatccaatggggaggaggggagagactcaaagtccaggggaaaagggtaaacagctttcagggccaaagtatggggtgggtgggcatcacccctggcagcctgtggggcccccagaaattccgggtcagccctgtacagtcaggagggggcagcgtgctgtcagcgggtaccagcaggtgtgacaacaacagcagagcctggaatctgtgatgtcaggctgcctgggaaaagggccaggcaggctgcttttatagggctgacttggtgtagtcaaagtgcttatcaagaggggccaagtgttcacgggccaggctgcacatggacaagtaactcagccgtctctcaagttgcttcacagaaagccaaccagtggcttctcatcagagaatggtgtttgcacctacagtcaaccataataaaactgcctcatctcattcataatgtagggccttagaggagacaactgactgagaggatggtttggtgacccaaggcagtgtctgcctgagggccccagaattgtaccaggataataccaacacaccgtatcggtacctcctaggagatacattaggttggtgcaaaagttgttgcggtttttgccattacttttagtagcaaaaactgcaatgactttcgcaccaacctaatatatagtgtatcacacacacacacacacacacacacacacacacacacacataccttttattttatttattttgttaagagacagggcatcactctgttgcccagactgtagtgcagtgccaagatcatagctcactgcagccttgaactcctgggtttgtgtaatcctcccatctcagcctcccaagtagctgggactacaggcatgcaccactatgcctggctaattttttaattttttgtaggcatggggactcttaatgttgcccaggctggtgttgaactcctggtcccaagcactcttccctcctgggcctcccaaagcactgggattacaggcatgagccatcacacacagccaaggctagtttttggtgttaaattaggctggatttcagccagccagttttacctctatagatttaccttcttgctgtttcccatatgaatccatgttaagcaaatttgggcggagtttcctactgcctggacaggctgtgtgtgtgtgtttctctttcccttgacacctcagggtcagcttgacagagaatggtactatgatccaaattcaagacattgatgctaatgcttcatgttgttgggagcccagcccggcaccctccgcccagactgcatatcacctactcttgtttcattgcttgaggaatatagatcttccagatcagagataactcccttaagccactaagagctaaagccagagtcccttaaacctatatccttgaggccctgaggaattatgagcatcagagagtggtcaagttgatataaatatgaatacagaaaagtgaaagagaatgtgtgggagagggggcgggggatccattcacatggatcccattggttttagagataaccagtgttaatatcggtgtgtacctgggtgatgtcataagatgaaagaagggtcttgcacgtgacctgcctccacagacacaagtacaggatggggaaaatgcatttattccacagatatttattgccatgtccaactatgggtcaatcattactccagggactggggagatggcagtcatgagcagaccaaacagaaagctctttgtttaggggctaccttaccttcaggaggccagggctttggcagcacatgggaaaaggtttcagtagttttaacttaaaactgtgctgcaggctttcccaaccgtggcgtggtcggcattttgggctggatcactcttcgttttggaggactgtcctgtgcgctttataggatgtttagcagcagctctggcttctacccattagatgccaatcgtgtccccaccccaccccctaagttgtacaattaaaacgtttccagacagtgccaaatgtccccggggagaatgaactcactctggctgagaactacggctttagcggaagctctcttagccatatacaagaaggggaagggcctgctctgcctctgagctgggagacccctacctctgctccgaatgaggatcgatccttcagagatgaactggggcaattatgaggtgaccagaatggcaaaaaggacttgaaacaatcttatttgaaaaacagctaaggccggacgcagtggctcacgcctgtaatcccagcactttgggaggccgaggcgggcggatcatgaggtcaggagttcgagaccagcctgaccaacatggtgaaaccccgtctctactaaaaatacaaaaattagccgggcgtggtggcgcgtgcctgtaatcccagctattcaggagcctgaggcaggagaattgcttgaacccaagaggcggaggttgctgtgagccgagatcgcaccactgcattccagcctgggcgacagtgagactctgtctcaaaaaaaaaaaaaaaaaaaaaaagaaaaacagctaaagctgctgtgtagccagaagaggtaactccctgggctacctcgtggctctgaaagacagtcaggtgtgtggaagagggattcagctggttctggcctgtccgaaggcaccggtcttggaagtaaaagctacgaggaggctgtgctcacatcagtgtcttgtggtttagctgtcacctacaggcagggcctaaccacatgtcgcctttccaagtcctctcctcctccctggatctggcagtgggtagtggtggttggtggaggtggtctcacccccacccccactcttggcagctctctttactctgtaagaagcgcttggtttgctggggggcatcccctgatgctctgggacccctgcaaccccggttctccctgaaatcaatgtggctggggctatgctggcttctaagagggactcgtgtgtggatgagggtgccagggaagctgcccatcaaatgtgagcataggcttgcccctcatgtctccacggctgagaccaggaaggcgtgggcacctcacttttctcggggataatgacagggaagaacaatgcaggaaaaaagttaaaactaaatgcagaaagaaatttacaactcagtgctaagaaagtactgctcccacggcctagggatgatccctactgttccctgtcccttcctcttcttcagaggaagttctcttcttgccttcattcgggagagatgaacacaaagcctctgtctctgtccaggtccaagcgcctccaatccatccccaagcaaacctctcctgcctctcgcttcctgtccttagatcagatccaccttttttccagataaaacgttctcagcttctctgtcccctgccttcatcctgggatgccttccaccccagggctgcccagcacagcacctcagttcccatactatgcatcctgaagtccatgtggttccttctggaacgagccccctgttggccttccactcccctttacctaccccccacctgcacaccttggggtccagcaggccaggcctttctttctttctttctttctttctttttttagatggagtttcactcttgtcacccaggctggagtgcaatgatgtgatctcggctcactgcaacctctgcttcccgggttcaagtgattctcctgcctcagtctccccagtagctgggactacaggcatgcgccaccatgcccggctaatttttgtctttttagtagagacagggttttatcatgttggccaggctggtctcgaactcctgacctcagatgatctgcctggcaggtcaggcctttctgcatcctcctcgccaccactgccccatctccactcctaggatccttcagcagccccttggataagaacacaaatatgcacccttcctacgaacaaccttcagagcctggggtgaccagagccacaggaaagaaaaagcacatattttcataagggcaatgcaacctgcaaagatgtcaccctgcccactctgaggacagccttttgtgccattgtgcagagcaatctcagccttctcctgttatcacgagtgggttcatggctgcccttgtcacaaccaaaaagcccactgaagtggggtttcatcccatcagaggctgggaaccacttctccatcagacccatgaggcatagtgccagagtccatggaattttggaattttttttttaagatggaatttccctcttgtcactcaggctggagtgcaatggcacgatctcagatcactgcaacctccacctcctgggttcaagtgattctcctgcctcagcctcccgggtagctgggattacaggtgcctgccaccatgcctggctaatttgttttgtatttttagtagagacagggattcaccatgttggccgggctggtctggaactcctgacctcaggtgattcaccctcctcagcctcccaaagtgctgagattacaactgtgagccactgtgcccggtccttttttttttttttaatgaaggaagagacccacgaaggcagaagtgcccaggtcccatgaaagctgcagtgtggctctgccaaaagccgggcaccgaaacgaacaggggaagctttgaagtataggtttgtatttattttgtctctttctccgaggttttaaagactcccaggcccaatttctttggtggggtttgaggtttggagtagctggggtgcccttggtagccttagtagggtggatgctttcttcaagttctcatgtaggctgggggcccaggcctgggatgactttgggctgcatgtgccagggaccgtctccctcttccagggctaagctcttgggcttggctttttctgttacttaaggaaggactatttgacagcccaagcttgccaaatcgggatggggctgcctcgagtggcctgagtcactggacatgttgaagcttttctcatgggcgagaggctttctttgtgctccaggtggactaggtacctctgaagttcttgccaaagtctgagacattaggattccgtgaacattagacttagtgctctataattgggatgctaaacctcaggagagagtagtggggggaaatcagatggaaaaagaaagtacacaatactttccaaaatcgaacgcagatcctgtttctcttgctgactgatttgacccatctgtgacgctgatctctcttaggggcacaatttagagaaaactcgagcaaacagctccaaaccaccgcggccttttcagactgctttgtggtcctctttgctttccggtatgtggcaggaaccttggactctggacaggtttctggactgttccgtgctctgcgagtgctgactctgcattcttgactttgcatcagagtggggtgccaggtcctggagcttgtttcttaagagataagccaccagctccatggactgtgggagccaaaggcaaacagaaacattctgcactgtagtcaatggagagattctgcctggggttgtaggtagagccctggagaggagaaggagatggccaacaggagacggagcctcagagcaggtcctttctgcagcccccttagagggcggatatccccccagcccctcagatatcagattggggaaagtggggatttgtggccctggaggcttcctgatgaatggtgcatgcgaaagcctgaactctgctgctgcgcccagcctcagggctaccagggcctctttcttgggaaagtccagcttcgcattagctcagccctcctggctccagtaagccccgctgacttccagttggcctggccatcatataaacggctctgttgaaggggcagcctctctgttcttgcggaagacttttttcccccaacatgagcacaacaggctggaggaagatgtgccataggtagagtaaccttgcaccatatgacttaaaaaaaagtcacatgaacaaaatccactaaaatatgaacaatggctgcctttgggtgatggactaagtgtgtgttgttctctcttttatatttccggatgctctcattttttcaaccataaacattcgctatttttatttatttatttatttttggagacagagtcttgctctttcacccaggctggagtgcagtggtgcaatctcggctcactgcaacctccacctcccaggttcaagccattcacctgcctcagcctcccaagtagctgggattacaggcgtgtgccaccacacccagctaatttttatatttttagtagagacagggtttcgccatgttggccaggctggtctcaaacttctgacctcaggtgatccacccacctcagccttccaaagtgttgggattacaggcgtgaggcaccgcacctggccgcattcactactttgtaatggactaaaagagctaaaataaagccggtggaatgttccacatatcatggcattttgaacaaaaactagatcttttataacacagagacccgcctaatggaaaaggcagtgaatattctcttgtggacacctgtcccacactgtttcctctaagccaatggctgtcaccaagctggtgacaggtagaacgcctcagttcttaggtgggctcacagggattacccttgtgaatcattaagacacaaacatccagtgaggactttctgagtgccaggtcttcttctctgtgccttacatgtgtgtttcatgcacacaaccacctgtgagctggcaccaatacagcagtcctcctttatccacggtttcactttctgcagttttagttacctgtgatcaaccatggtctataaatattaaatgaaaaattacagaaatgaatctaagttttaaattgtgcacattctgaggagtgtggtgaagtctggcaccatcccacccaccctgtaacgccctggacgagtccgccctttgtccggtggatccacgctgtatacgctacctgcctggtagtcacttagtagccatctcagttatcagattgattgtcgagatatagcagtgcttgtgttccagtcacacttatttttacttactaatggccccaacgtgcaagagcagtgatgtgggtaattcgaatatgccaaagagaagccgaaatgtgcttcctttaagtgaaaggtgaagttcttgacttaataaggaaagaaggctgagtgcagtggctcctgcctgtaatctcagcactttgggaggccgaggcaggtggatcacttgaggtcaggagtttgagaccaacctggccaacacggcgaaaccccatctctactaaaaatacaaaaattagctgggtgtgttggcatgcacctgtagacccaactacttaggaggctgatgcaggagaatcgcttgaaccctggaggcagaggctgcagtgagccaaggttgcaacactgcacctccagcctgggcaacagaacaagactccatctcaaaaaaaaaaaaaagggaaagaaaaagaaattatatgctgaggttgttaagatctatggtgagaatgaatcttctatttttttgttttttctttttgttttttttggtagagatgggattttgccctattgcccaggctggtctcaaaccggccattgttcacatggccattgttcagcctttattcacattttggtggattttgttcatgtcagaacaaaatcaactgatccacccaccttgacctcccaaagtgctgagattacaggcataagccaccaagaatgaatttcctatccatgaaattgtaaagaaggaaaaagaaatttgtgctaattttgctgttgcacctcaaactgcaaaagttatggccacagttcatggtaagtacttagttaagatggaaaagtcattacatttgtgagtggaagacatgaacagaaacgtgttctgatcgggcgcagtggctcatgtctgcaatcccaacactttgggaggctgaggcaggagaatcacctgaagccaggagtttgaaaccagcctaggcaacatcgcaagaccttgtctctacaaaaaaataaataaataaataaataaaaatcaataaaacaacaaagaaatcttgtaggtgtggtggtacatgcttgtagtcccagctactcttggagtcagacgagtattacttcagcccaggagttcaaggttacagtgagttatgatcacacactgcactccagcctggatgacagagcaagactctgtctctaaaaaaattaagaataaacatgtttgatttatggcaatcaggtttggtacaatccaaggttccaggcattcactgaggcccttagaatgtgtctctctctgataaggggggactactatattattaaaatatcatacccatcttagagaattgaaaactgaggcattgagaagctagatatgtggcagagctgggatttgagcccaggcaacagctggctgcagagcctgggtgctgaaccgctgcaccattctgcctcttgtaggagcagaaatccaggtggaactgaaaggaaaaacaagcaggtagagaagttaagccagcccataggagaggctgtgggtgcttgctctgggctggttcaggtgggggttgacacggcagggtcagggagcgagtcagaagagctggggacaactcagtcttgttatttccgcagcgtgctggacatttttccaactgtggtagccctggcccaggccagcttacctcaaggacggcgctttgatggtgtggacgtctccgaggtgctctttggccggtcacagcctgggcacagggtaagtggaggaggtacttgcccacatgtaggctctttaggaggctggtctgctgcctctcacctctgtgcagacagaaccatcatcagaagatggtcaagaacaggctgcaggtcggatacagtggctcacgcctgtaatcccagcactttaggagaccaaggcgggctgatcacttgaggtcaggagttcgagaccagcctgaccaagatggtgaaacctcacctatactaaagatacaaaaattagctgagcatggtggcatgggcctgtagtcccagctacttgggaggctgaggcagcagaatcgcttgaacccgggaggcagaggttgccgccagcaagtggctggttcagaccccaaaaggtgaagcatttgagatgagcctctttctacccccaacccccagtccagatttatatttaacagtttggcttagggtgggtgtatataggttctcattccctataatgggcaatttcttttcctgcatgtatttaatttaataacatagctacccagtatttttgttagatgagatgactgactagtgtctgcaacttgtttattgtgagcctcaccctctagaatggaagcttcttgagggcaagaatctgagctgttgagttgagctccgagttctcactgcctgcagtcagccagcatttcagtccatgcaaactggatgaaccaatgaaggaacaaatgaacaaatgagtgaaagaccctttggacagcaggtccagcaagggccttacatccaacattctcccagctccagagggctcagcacactcttggcagcctgttttttttttttgtttttttttttgagatggagtcttgctctgtcacccaggctggagtgcagtggtgtgatctcagctcactgcaacctccgcctcctgggttcaagcgattctgctgcctcaccctcccgagtacctgggactacaccctcccgagcccatgccaccatgctcagctaatttttgtatctttagtataggtgaggtttcaccatcttgaccaggctggtcttgaactcctgacctcaagtgatcagcccgccttggtctcccaaagtgctgggattacaggtgtgagccactgtatccgacctgcagcctgttcttgaccaagcagaccttggcaatggctctgggcttccacttcccagcatcacctcctcaatgtcccctgtttgcactctgaagcactcattggcagtgacagccaggaaatgtcaggcctcatggcctttccttgtcttttccctgtgttttcctttcaccaaaaggaagaggaagcaggaggaggcaaggaggcggaaggagcacagagtcccctctgcaacgccctacaaatgcatggcttcttggtgagggacccacacatcaaagggtctatttgtgtctttgctaagggtcacatggaagtgactcaaatgtacagaagtgtcctgtggctggtagttaccaaagctgcccttcccacccagcctcccccagcaaaccagaacatgggtcttctatgggccatcggttcttctgtgcacattaatgcagtttttaggggttgttggatgaagcctgagaggtgttctgaagtcctgcttctccccagaatatctgccccctagagctgcagacccttccaggcctagcccttctccctaagcaggagcagccaggcaggaagatggtttccgccttgaggttggaagttagcagtatgtgaccctggagggttgtcacagacgtcattggagaggtgctccggagtgtttattaccatggctgctaggaataattggggtcatcaggaagtgcttcaaggactgtgctctccttgacgttgtcggtactgcctgtgggagccagctccttcatgtactaacttcctttctcagacgggagagctctgctcttgctctaactggagttttgcgcaggctcgtagagaccccatcctaactagtgcccagcagggttaggcccaggaaccagattggaaaaccagatacaagtcacagcatcgtcacggggaggtatgatggcgtggttaatgcagctggagtcaggactgatttgctccctaaccacaccccatggcccagaaagaaacagccatgcttactgcttgtgggaagcagctgatggtatcttcaaggttaagagcacacggggctggcacctgtgggtcacactcagtctcccagagcatgcctgcagtgtcagtgaagacacttgagataagattctgaagtttgaggacaacatgggtagttgctggacctgaatttgggtttggtcttctctagtcagtcctctctatcaaagcaaagtcatagacctaaggaaataagagtaaattgtctcaaatttggaatagctatgggggaggcttgaaggtaagaatatgaggaattatatatatatacacacacacacaatattctatacatacttacatgtatgcatatgtgtgcatacgtctatacatgtgtgttatacgtgtgcatgcatattctagacgtgtatgcatatgcatgttttgttttaatttaatttaattttattttattttttgagaggagtctcactctgtcgcccaggctggagtgcagcggcacaatcttggctcactgcaacctccacctcctgggttcaagcgattctcctgcctcagcctcccaagtagctggtattacaggcgttcaccaccacgcctagataatttttgtatttttagtagagacagggtttcactgtgttggccaggctggtgtcaaactcctgacctcaggagatctgcctgcctcggtctcccaaagtgctgggattacaggcgtgagccactgtgcctgggctgcatatgcatgtttatgtaccatgtatgtatattcatgtatgcatatccacatctgtatacatacatgcatacatatgtatgcatatgcatgcttataccacacatgcatacacatgttcgcatatgcatgtgtctatataaacatacatatgcatgcttatgtttatacactatacatgtgtacatatgtatgcctatgcatgtctatgcacatatatgtatacacatgcatgcacacacatacatgtatacatatgcatatgtccaggcacataaatagagatatacacacatatttatatgcaggtgtatgcacatgtatacatacgtgtatatatatgcatatatcaatatacacatacatatgtgtacacagatgcatatgtctgtaacatatgcatacatgtgtacatatgtattttaaaataagcacaatttgtgttcaccctcagatacatcctgggcttacaaggattccaatatgagttggtttagaaacactttcagttctagaagctcaaagtaactcctggatattcaactgggaacaatatgccaatgcttctcagcaatccagtccttccctattgcaaaccaagtaaccaagagttaaggagaggagcaagagagttgagaggtgtcatgtgcacaatgagctccagttccacactggatggtcttctcacaacccactccagcaacctctagggacgttgtctctgtgatgttcgaaaccacatcagctgacaccatgctgcatattcttgcatcagctcaacctcctgcttctgatcttgatgggtctgtgtctaggcagtgaggggcaccaggagagagatgagggctgggaaggggagggctgcacagcctagaaccaaaggtcccactttgtgctttcctggctcccagatggaagctgaaggtggtaacatcatcactggtcaggtcgtgtcttagccccaggttgtcatgatcaggtccagaaattgtcaacgaaggaacgtttcccctaacagctctgcatctgcccagcctcacacagtctggggctgctgtgggtcatcaaatgcttgacacgcccctggaggccatacatcgaggaaacaagctgagttttaatgtccagaaagaacgctgatcacttctcttagggaggcccctagtggcgagagatgtcatctggcgtggctggcaaactgaccacccccatccaccccctttggaggctgtagctgtgcatccccacctgaatggagaagaagcccaccttcaggggatgctatatcagcaccctgtgggacttaaggtaaaggaatgctctcgtgcttaaaaaacaaaacaagataaaatagagcaagaaaggccaccaggaaggcaaaacaagtttgcagaagataaagtcatctttgaaatttgaaccaggcatctggagagctgtgattcatgtgtacttttgacagcttccttcctatattgatataaacaagaaagccataatgggtcttctcaaacaaacaaaaaaaatgcatagacaagttctccaaagtccatctatgtttctgagaatgagccatcccacagttttgcttcctcgtggattttggaagttgcctctggtaacgccacataaatagtgggaatatagcagcccaccctcatggaatttctgtgactgagacgcaagtactgtgactgatctgaagcagcaacttcactcccatcttctgcatgtccgcgtgcatcgtatatcagttgacaatagattttccaagtctcccacttcctgctgtctcaagaaggaaacaaaacagtctcctgtggtgaagaggcttggctttctgcagggatggaagaagtgagggttttcagttacgacttcttttcctgtttggaaggaacctgctatcatcatgcgcgccctgggtttgtgcagggattgtcacgagaacctggaagccgcaggtgtggggaggagccccaccttggcggcatcctctcagagctgtgaaactccgggggacagctgtttactgctccaacagatgtttctcatttttttcttaagtctcgtgtggaaactttgaatcatgtaagtgcctttccagccctatatacggttgtgattcataccaaggcagtctcatgcttttagcccagacccaccaacctaccaaggacactggccttttgttttctttcacatccttccctcgagaaccctgatttaggtgtttccattctgtacggtaattcttttatttgtgacctgatgaggaaagatttcctcagtccaaatatagtcggattgagtcatagctgtgggcgtctgtgaccagagtctgggctgtgcccgattctgcggaaatcaaggatgccttcttttgtaccatccttgctcaagggagagttggaacattgacttgatgctgaagaagcctttcttcaaagacagctgagggtcacctgcatcagaacccttggaaatacttgtaaaacaagtaagtccccagggcccatcctgaccctgaggggttggaactcaggcagggtggccttgtgggcctgtgaccggtgccccccacacacagagccctgcacttggagggaccctgtgcttggtttaaagctctgccgtggtcatcatgaaattttaagtttgtgaacaaggtatccctgatttgcattttgttgtggactttgcaaattacatagcaggtttcaggcctagaaatctgacctacctagtgagaccttttgcctactcttccagagttgtaacccactcccatcaattaaccagcaaaataacaacttcacaggctccctggagttgactggtgtggactccaggcttgtatctgtcagtgtgtgtttgggcacagggatagggagaccagaccctgaaaaagacagtaatatgttccagggagcatctagcatcatctagcatgttttattttcttttgctgtttcgagacaggatcttgctctatcacccaggctggagtgcagtggtatgatcatagctcactgcagcgttgacctcccaggctcaaacaatcctctcacctcagcttccaagtagctaggaccacaggtgtgcaccaccatgcctggttaacttttgtatttttttgtagggaggggtcttgctgtgttgcccaggctggtttcaaactcctgggctcaagtgatcctcctgcctcgacctcccaaggtattgggattacaggcatgagtcaccgagttctgccaatttttctattagtaagctctgccaccctttctcaggtgctgttccaccccaacagcggggcagctggagagtttggagccctgcagactgtccgcctggagcgttacaaggccttctacattaccggtgagtgaggggccacttagccctgcctcccacagtcacagctgcacggggaccccatggactctcacccaggcctctgggaatgagtgtgagtccctcctttgtggggggttctcagcacctcttgacaagcgtctcctccaaacccagggtccctgcacaggctctctggatccctcatatgcaaataagatctttgtgctgttcacctgaatttctagtgagctgggagctctcagcacgtttattcagctccttttcacatagagagcatttcctattgtcgtgctttaaatgccagtttggatgaacattaaatggaagcctagagatattttaaagtataatttacttgacaatagaccgtttcagaaaatagattttagaggactagttagcaaaccgacagaagtctctctgcttcttggttcactgtgactatctgtctcttagatgtatactttagaaatgtcatactgtatcaggatggtcctcagggtcttccaatggcttcttgctgccaattgaattcagactctcaatcccgagtcctactgtctttccacccttagttttccaagaacaagtctcctcttccttggtctccatattaaaatccttttaagcctttatggcccaagtcaaatgccactttcataaaactctcttatcttcccagctgggtaggaattctggagaactctgttatctctcactttctgccatgcatgcccgtcatttaggtacacgtcttatttcctgtactagttttttttgttgtttgttgttgttgttgtttgtttgtttgttttgagacagagtctcgctctgtcgcccaggatggagtgcagtggcgtcatcttggctcactgcaacctccgcctcttgggttcaagcgattctcctgcctcagccttctgagtagctgggactacaggtgtgcaccaccattcccggctaattttttaatttttagtagagactgtatttcgtcatattggtcaggctggtcttgaactcctgacctcgtgatccgcccgcctttcagcctcccaatcctgtactagttttttgtttttgtttttgttttttgagatggagtctcgctctgtcacccaggctggagtgcagtggcgtgatcttggctcactgcaagctctgcctccctggttcacgccattctcctgcctcagcctcccgagtagctgggactacaggtgcccgccacctcgcccgccttatttttttgtatttttagtagagacagggtttcaccgtgttagccaggatggtcttgatctcctgacctcgtgatccacccgcctcggcctcccaaagtgctgggattacaggcatgagccaccttgcccagcctgatcctgtactagttttaagctttctaaatttggaactctttcagcactttaatctttgttgtcttgaagtgcttagcacacttagtaggaacgctacaatttttaagtaaatgaaaaacaaaaaataaaaaaaggaaaacctgtgacctaatgcagattccaacttgattcagttatttaatgttggagcttttcaaattatatgataaaaaaattattttccctgagtgtaaataagtgatcctgaagaaaatgtggcataaaaacaaaacatgacttgaggggtattaaaaatgtcacaaaaatctttgattctctaaaacctaaaactcagtcagatatttgttgttttcggttgaaaagtttctagattagagtccttatattacattatctaagaggtatgggacctccaggctgagttaatttcacaagtaaaagtcctgccagaaagcccttggcaccacaatgttggaatcagacatgttactatgaagtaatagggctatttaaatgatcacaatcagataggaactataacacccaggggaggtctgctcttctaaggagtcaccaaactcccaagagagtctgggtagggagcactgaacttttaatccatcagtgaaaactgggaataggatgaaacaggggcatgttctgattccctcttcctcttgcttctaatatttgcattccagttacttacaactgcttttggataagctagatgaattgacatctactacattagattagagaaagatgtgttcgtctatgatgaggatatgatgttatggtcacgcactgggagtggtcttgaaaagacaaccagtctgttttggtatgtggcctagaattaaggtgtaccttattgtttttctttttttttattattatactttaagttctagggtacatgtgcacaacgtgcaggtttgttacctatgtatacatgtgccatgttggtgtgctgcacccattaactcgtcatttacattggttatatctcctaatgctttccctcccccctcaccccaccccacgacaggccccggtgtgtgatgttccccttcctgtgtccatgtgttctcattgttcaattcccacctatgagtgagaacatgtggtgtttgtttttttgttcttgtgatagtttgctgagaatgatggtttccaggttcatccatgtccctaccaaggacgtgaactcatccttttttatggctgcatagtattccatggtgtatatgtgccacattttcttaatccagtctatcattgatggacatttgggttgggtccaagtctttgctattgtgaatagtgccgcaataaacatacgtgtgcatgtgtctttatagcagcatgatttataatcctttgggtgtatacccagtaatgggatggctgggtcaaatggtatttctagttcgagatccttgaggaatcgccacactgtcttcctcaatggttgaactagtttacagtcccaccaacagtgtaaaagtgttcctatttgtccagttaaggcaacctgtacacaaagtgaaaggcccagatctataatgtataatttggtgaggttttataaatgtagataccgtgtatgtacccttttaatggtgtgaattccattgattctttttctttttccattgattgattttcaagtgttaagccaactttacattcctcaataaatcccatttagtaatgatgtatcatactttttatatcttgctgattttgatttgctaagattttgtctataattttcctttcttgtctatgtcaaggtttggtatcaggattttgctggccttataaaatgagttgagaaatattcccttctctattttctgaaagggtttgtggaagatcagtattatttctttcatgtttgattgaattcatctgtgaaatgatttgccaaattcattgttgtgaagattttgtcatatttttaaaaagagtgttagtattttaggtcttatatttagatctctgatccatttccagttaatttttgtatgtggcataagtaagggtccaacttcattgttttacatgttgacatccagttttcccagcatcatttattgaaaacactgtcctttccccattgaatggtcttggcacccttgttaaaaatcatttgatcatacatgtgagggataatttccactgtctattctatttcattagttatatgtctatgtttatgccagtaccacactgttttaattactgtagacttgttgcagttttgaaatcaggagtgtgagtcctacagctttgggctttttttttttttttttttttagactgttttgactatttctgggtcctctgagattccatgtgaattttaggatggctttttctatttctgcaaaaaacatcatcaggattttgataaggattgtactgaacctgtagaccacttggggtagtattgacattttaacaatattaagtcttccaatccatgaacatgggatgtaaccatttgtttatgtcttctttaatgtctttcagctatattttatggttttcattatgcaagtctttcacttttttgtgttaattcctattttactctttttgatgccattgtaaatgaagttgttttcacaatttcgttttcagattgttcactgttagtgtatagaaatataactggctttgtgttctgaatttcaatcctgccattttgctgaattcctttattagttctgtttttatgtggaatatttaggttttctacatataagattatatcatatctgaaggaggtcattttacttcctccattccaatttggatgctttttatttctttttcttgccgaattgctctggctggaatgtccagtactatgtggaacagaaatggcaaaaatggcattgaaacttttattaatatattatgtccttctctttgtctcttataaccctttttaaaatttaaagtctattttgtatgatattagtacaaccactcttgctatcttttggttactatttgcatggaaaatcttttcctaccatttcactttatttattttttatttttccatgggttattgggatacacgtggtgtttggttacatgagtaagttctttagcggtgatttgtgaaattttggtgcacccatcacccaagcagtatacactgcaccctatttgtagtctttcatcccttgccccctcccactttacccccaagtccccaaagtccactgtgtcattcttatgcttttatgtcctcctcataacttagctcccacatatcagtgagaacatacgatgtttggtttttcatttctgagttacttcacttagaataatagcctccagtctcacccaggttgctgcaaatgctgttgattcattcctttttatggctgagcagtattccattatatatatatcacagtttctttatccactcattgattgatggacatttgggctggttccacatttttgcaattgcaaattgtgctgctataaatatgtgtgtgcaagtatctttttcgtacaatgacttcttgtcctctgggtagatacccagtagtgggattgctggatcaaatggtagttcagcttttagttctttaaggaatctgttttccatagcggctatactagtttacattcccatcagcagtgtagaagtgttccctgttcaccgtatccatgccaacatctactgttttttgattttttgattatggctattcttgcaggaatgaggtggtatcatattgtggttttgatttgcatttctctgatcattagtgacattaagcattttttcatgtttgttggccatttgtatacttttgaggcttgtctattcatgtgcttagctcactttttgatggtattgtttctttcttgctgatttgtttgagttccttgtaggttctggatattagtcctttgtcagatgtatagattgtgaagattttctcccactgtgtgggctgtttactctgctgactgttccttttgctgtgcaaaagatctttagtttaattatgtcctagctatttatatttgttcttattgcatttgcttttgggttcttgttcatgaaatccttgcctaagccaatgtctagaagggcttttccaatgttatcttctagaatttttatagtttcaggtcttagatttaagttcttaatccatgttgagttgatttttgtataaggtgagagatgaggatccagtttcattctcctacatgtggctagccaattatcccagcaccgtttgttgaaaagggtgtcctttccccactttatgtttgtgttggctttgtcgaagatcagctggctgtaattatttgggtttatttctgggttctctattctgttccattggtctatgtgcctatttttataccagtactatgctgttttggtgattatggctttatagtatagtttgaaatcaggtagtgtgatgcctccagatttgttctttttgcttagtcttgctttggctatgcaagctcttttttgtttttgtatgaatttttctaattctgtgaagaatgatggtggtattttgatggggattgtgttggatttgtagattgtttttagcagtatggtcattttcacaatattgattctacccatccatgagcatgagatgtgtttccatttgtttgtgtcatctatgatttctttcagcagtgttttgtagttttccttgcagaggtctttcacctccttggttaggtatattcctaagtttttttttttttcagctattgtaaaaggggttgacttcttgatttgactctccgcttggttgctgttggtgtatagaagagctactgatttgtgtacattaatcttgtttctagaaacttagctgaattctgttatcagttctaggagctttctggaggagtctttagggttttcgaggtaaacaatcatattgtcagcaaacagtgagagtttgacttcctctttactgatttgaatgcccttttactgatttgaatgccctttacttctttctcttgtcttgctctggctaggacttccagtagtatgttgaagaggagtggtgacagtgggcatccttttcttgtttcagttctcagagggagtgatatcagcttttccccattcagtattatgttggctgtgggtttcttttttttttttttattggtgcaaattactgtttattaagcattatttattccttatgcaaaacaaatgtgcactagcctttggcattaactaaacactctctacatatttctttttttattattattatactttaagttttagggtacatgcgcacaatgtgcaggttagttacatatgtatacatgtgccatgctggtgtgctgcacccattaactcgtcatctagcattaggcatatctcccaatgctatccctcccccctccccccaccccacaacagtccccagagtgtgatgttccccttcctgtgtccatgtgttctcattgttcaattcccacctatgagtgagaagatgtggtgtttggttttttgttcttgcaatagtttactgagaatgatgatttccaatttcatccatgtccctacaaaggacatgaactcatcattttttatggctgcatagtattccatggtgtatatgggccacattttcttaatccagtctatcattgttggacatttgggttggttccaagtctttgctattgtgaataatgctgcaataaacatacgtgtgcatgtgtctttaaagcagcatgatttatagtcctttgggtatatacgcagtaatgggatggctgggtgaaatggtatttctagttctagatccctgaggaatcgccacactgacttccacaatggttgaactagtttacagtcccaccaacagtgtaaaagtgttcctatttctccacatcctctccagcacttgttgtttcctgactttttaatgattgccattctaactggtgtgagatggtatctcactgtggttttgatttgcatttctctgatggccagtgatggtgagcattttttcatgtgttttttggctgcataaatgtcttcttttgagaagtgtctgttcatgtccttcgcccactttttgatggggttgtttttttcttgtaaatttgtttgagttcattgtagattctggatattagccctttgtcagatgagtaggttgtgaaaattttctcccattttgtaggttgcctgttcactctgatggtagtttcttttgctgtgcagaagctctttagtttaattagatcccatttgtcaattttggcttttgttgccattgcttttggtgttttagacatgaagtccttgcccatgcctatgtcctgaatggtaatgcctaggttttcttctagggtttttatggttttaggtctaacgtttaagtctttaatccatcttgaattgatttttgtataaggtgtaaggaagggatccagtttcagctttctacatatggctagccagttttctcagcaccatttattaaatagggaatcctttccccattgcttgtttttctcaggtttgtcaaagatcagatagttgtagatatgcggcgttattcctgagggctctgttctgttccattgatctatatctctgttttggtaccagtaccatgctgttttggttactgtagccttgtagtatagtttgaagtcaggtagtgtgatgcctccggctttgttcttttggctgaggattgacttggcgatgcgggctcttttttggttccatatgaactttaaagtagttttttccaattctgtgaagaaagtcattggtagcttgatggggatggcattgaatctgtaaattaccttgggcagtatggccattttcacgatattgattcttcctacccatgagcatggaatattcttccatttgttcgtatcctcttttatttccttgagcagcagtttgtagttctccttgaagaggtccttcacatcccttgtaagttggattcctaggtattttattctctttgaagcaattgtgaatgggagttcactcatgatttggctctctgtttgtctgttgttggtgtataagaatgcttgtaatttttgtacattgattttgtatcctgagactttgctgaagttgcttatcagcttaaggagattttgggctgagacaatggggttttctagatatacaatgatgtcgtctgcaaacagggacaatttgacttcctcttttcctaattgaataccctttatttccttctcctgcctaattgccctggccagaacttccaacactatgttgaataggagtggtgagagagggcatccctgtcttgtgccagttttcaaagggaatgcttccagtttttgcccattcagtatgatattggctgtgggtttgtcatagatagctcttattattttgaaatatgtcccatcaatacctaatttattgagagtttttagcatgaagggttgttgaattttgtcaaaggccttttctgcatctattgagataatcatgtggtttttgtctttggttctgtttatatgctggattacatttattgatttgcgtatattgaaccagccttgcatcccagggatgaagcccacttgatcatggtggataagctttttgatgttctgctggattcggtttgccagtattttattgaggatttttgcatcaatgttcatcaaggatattggtctaaaattctcttttttggttgtgtctctgcctggctttggtatcaggatgatgctggcctcaaaaaataagttagggaggattccctctttttctattgattggaatagtttcagaaggaatggtaccagttcctccttctacctctggtagaattcagctgcgaatccatctggtcctggactctttttggttggtaaactattgattattgccacaatttcagatcctgttattggtctattcagagattcagcttcttcctggtttagtcttgggagagtgtatgtgtcgaggaatttatccatttcttctagattttctagtttatttgcatagaggtgtttgtagtattctctgatggtagtttgtatttctgtgggatcagtggtgatattccctttatcattttttattgcatctatttgattcttctctctttttttctttatttgtcttgctagcggtctatcaattttgttgatcctttcaaaaaaccagctcctggattcactgattttttgaagggtttcttgtgtctctatttccttcagttctgctctgattttagttatttcttgccttctgctagcttttgaatgtgtttgctcttgcttttctggttcttttaattgtgatgttagggtgtcaattttagatcttttctgctttctcttgtgggcatttagtgctataaatttccctctacacactgctttgaatgcatcccagagattctggtatgttgtgtctttgttcttgttggtttcaaagaacatctttatttctgccttcatttcattatgtacccagtagtcattcaggagcaggttattcagtttccatgtagttgagcggttttgagtgagattcttaatcctgggttctagtttgattgcactgtggtctgagagatagtttgttataatttctgttcttttacatttgctgaggagagctttacttccaagtatgtggtctattttggaataggtgtggtgtggtgctgaaaaaaatgtatattctgttgatttggggtggagagttctgtagatgtctgttaggtccgcttggtgcagagctgagttcaattcctgggtatccttgttgactttctgtcttgttgatctgtctaatgttgacagtggggtgttaaagtctcccattattaatgtgtgggagtctaagtctctttgtaggtcactcaggacttgctttatgaatctgggtgctcctgtattgggtgcatatatatttaggatagttagctcttcttgttgaattgatccctttaccattatgtaatggccttgtctcttttgatctttgttggtttaaagtctgttttatcagagactaggattgcaacccctgcctttttttgttttccatttgcttggtagatcttcctccatccttttattttgagcctatgtgtgtctctgcaggtgagataggtttcctgaatacagcacactgatgggtcttgactctttatccaatttgccagtctgtgtcttttaattggagcatttagtccatttacatttaaagttaatattgttacatgtgaatttgatcctgtcattatgatgttagctggttattttgctcgttagttgatgcagtttcttcctagtctcgatggcctttacattttggcatgattttgcagtggctggtaccggttgttcctttccatgtttagtgcttccttcaggagctcttttagggcaggcctggtggtgacaaaatctctcagcatttgcttgtctgtaaagtattttatttctccttcacttatgaagcttagtttggctggatatgaaattctgggttgaaaattcttttctttgagaatgttgaatattggcccccactctcttctggcttgtagagtttctgccgaaagatccactgttagtctgatgggcttccctttgagggtaacctgacctttctctctggctgcccttaacattttttccttcatttcaactttggtgaatctgacaattatgtgtcttggagttgctcttcttgaggaatatctttgtggcgttctctgtatttcctgaatctgaatgttggcctgccttgctagattggggaagttctcctggataatatcctgcagagtgttttccaacttggttccattctccccgtcactttcaggtacaccaatcagacgtagatttggttttttcacatagtcccatatttcttggaggctttgctcatttctttttattcttttttctctaaacttcccttctcgcttcatttcattcatttcatcttccatcgctgataccctttcttccagttgatcgcaccggctcctgaggcttctgcattcttcacgtagttctcaagccttggttttcagctccatcagctcctttaagcacttctctgtattggttattctagttatacattcttctaaatttttttcaaagttttcaacttctttgcctttggtttgaatgtcctcccatagctcagagtaatttgatcgtctgaagccttcttctctcagctcgtcaaagttattctctgtccagctttgttccgttgctggtgaggaactgcgttcctttggaggaggagaggcgctctgctttttagagtttccagtttttctgctctgttttttccccatctttgtggttttatctacgtttggtctttgatgatggtgatgtacagatgggtttttggtgtggatgtcctttctgtttgttagttttccttgtaacagacaggaccctcagctgcaggtctgttggagtactgggccctgtgaggtgtcagtctgcccctgctggggggtgcctcccagttaggctgctcgggggtcagggacccacttgaggaggcagtctgcccgttctcagatctccagctgcgtgctgggagaaccactgctctcttcaaagctgtcagacagggacatttaagtctgcagaggttactgctgtctttttgtttgtctgtgccctgcccccagaggtggagcctacagaggcaggcaggcctccttgagctgtggtgggctccacccagttcgagcttcccggctgctttggttacctaatcaagcctgggcaatggcaggcgcccctcccccagcctcgctgccgccttgcagtttgatctcagactgctgtgctagcaatcagcgagactccgtgggcgtaggaccctccgagccaggtaagggatgtaatctcctggtgcgccgttttttaagcctgtcggaaaagcgcagtattcgggtgggagtgacccgattttccaggtgccgtctgtcacccctttctttgactaggaaagggaactccctgaccccttgagcttcccgagtgaggcaatgcctcgtcctgcttcggctcgcgcacggtgcgcgcacccactgacctgcgcccactgtctggcactccctagtgagatgaacccggtacctcagatggaaatgcagaaatcacccgtcttctgcgtcgctcaacgctgggagctgtagaccggagctgttcctattcggctatcttggctcctccccctggctgtgggtttcttatagatggcttttattacattgaggtatgtcccttgtatgccgattttgctgagttttaatcataaagcgatgctggattttgtcaaatgcttttactgcatctattgagatgaccatgtgatttttgtttttaattctgtttatgtggtgtatcacatttattgacatatcacatttattggtatatgttaaactatccttgcatccctggtatgaaacccccttgattatggtgaattatctttttgatatgttgttggattcagttagctagtattttgttaaggattttagcatctatgttcatgagggatatcagtctgtagttttcttttttggttatgtcctttcctggttgtagtattagggtgattctggcttcatagaatgaattagggagggttccctctttgtcatgtggaatagtgtcaaaagggttggtaccaattcttctttgaatgtctggtggaattctgctgtggatccatctggtcctagacttttgttgttgttgttgttggtaatttaaaaattaccattttaatctcgctgcttgttattggtttgttcagggtatctaattcttcctgatttaagctaggagggttgtatttttccaggaatttatccatctcttctaggttttttagtttaaatgcaaaggtgttcatagtagccttgaatgatcttttgtatttttgtgatgtctgttgtaatatctcctgttttgtttcttattgagtttatttggattttctctcttcttttcttggttaatcttgctaacagcatatcaattttattcatattttcaaagaaccagctttgtgtttcatttatcttttttatttttttgtttcaatttcatttagttctgctctgatcttggttatttccttttgtctgctgggttttgtttgttcttgtttctctagttccttgaggtatgaccttagaatgtcagtttgtgctctttcagtctttttgatgtaggcatttaaggctatgaactttccccttagcccctcctttgctgtatcccagaggttttgataggttgtgtcactattattcagtttgaagaacttttaaatttccatcttgatttcatttttgactcaatgatcatttaggagcaggttatataatttccatgtatttgcatggttctgaaggttcctttggaatggatttccagttttattccactgtggtctgagagagtgcttgatataatttcaattttcttaaatttattgaggctcattttgtggcctattgtatggtctgtcttggagaaagttccatgcactactgaatagaatgtgtattctgcagttgttggttggaatgttctgtatatatctgttaagtccatttgttacaaggtatagtttaaatccattgtttctttgttgactttctttcttgatgacctgtctagtgctgtcagtggagtattgaagtcccccactattattgtgttgccgtctatctcatttcttacgttattagtaattattttataaatttgggagctccagtgttaggagcatatatgtttaggattgtgatgttttcctgttggacacggccttttaccattgtataatgtctctgtcttttttaactgccgttgctttaaagttggttttgtctgatataagatagctacccctgcttacttttggtgttcatttgcatgaaatatctttttctacccctttactttaaatgtatgcgagtccttatatgttagatgagtctcccgaaggcagcagatggttggttggtgatcttatccattctgctgttttgtatttttttaagtggagcatttagaccatttacattcagtgttaatattgagatgtgaagtaccattccattcctcatgctatttgttgcccatgtgccttggtttttttgtttttgcttttcaaattgtatttttgttttataggtcctgtgagctttatgctttaaagaggttccattttgatgtgtttccaggatttgattcaagatttagagctccttttagcagttcttgtagtggtgacttggtagtggtgaattttctcagcatttgtttgtatccttctttcatatatgacgcttatttttgctggatacagaattcttggctgataattgttttgatggaggaggctgaagatatggccccagtcctttctagcttgtagggtatctgctgttaatcctgataggttttcctttataggatacctggtatttttgtctcatgtttttctttataggttacctggtgatgtttttgcaatgaatttcccaggtgttctttgagcttcttgtatttggatgtctaggtttctagcaaggccagggaagttttccttgattattcccccaaatatgttttccaaacttttagatttctcttcttcctcaggaacaccaattattcttagatttggtcgtttaacataatcccagccttcttggaggctttgttcatattttcttattctttttcctttgtctttgttggattgggttaagtcaaagaccttgtcttcgagctctgaatttctttcttctacttgttcaattctattgctgagactttccagagcattttgcattactagaagtatgtccaatgtttcctgatgttttaactgttttttctttattctatctatttccttgaatatttctcccttcacttcttgtattgatttttggatttccttgcattgggcttcacctttctctggtgcctccctaattagcttaataactaacctcctgaattctttttcaggttaatcagggatttttttcttggtttggatccattgctggtgagctagtgtgattttttggggagtgtcaaagagccttgttttgtcatattaattaccagagttggttttctggttccttctcatttgggtaggttattattaagtcttagtagttttggtgagcctgggcccttggactgtgaacttcacaagtgcttcttagtctatcccttccctccccttaggtggaacagctagagtggctagagctgggtatccccctacccttaggtcagttaggctgtgagaaaaacctaagtaatttaagctctggtaaattagtttctcctgagggcaggccttgttaagaaaactagaatgttttggtatatttaaaaattacttttctcctaccccttttggaaggatgaagagatttttctccagtatttactgtaagaacttggttgagctcctggaggtaaaactcacaaaagtgtgttgtgttttgggtgccgcggtggggggtggcgcttgataactgggccccactggagtttttcatctctcagacttgtccacactgagcctccagcaatttgtcaattacagttcagggcttccctactcctggcactggttcttgcagaggtttctgcttgtgggtttctgctctgttaagttgtgattgtttctatttgcttgtctgtctctctaattttgggggcagtagtttgccctgtgacttcacttctccaaaagacctaataagagttgctgaattttttttttttttttttttttttttttttttgagatggagtctcacattgttgcctgggctggagtgcagtggcacgatctcggctcccaggttcacgtggttctcctgcctcagcctcccaggtagccgggattacaggtgcccaccaccatgcccagataattttttatatttttagtagagacggggttttaccatgttggccagactggtctcaaactcctgacctcatgatccgcctgcctcaacctcccaaactgctgggattacaggcgtgagccaccacacccggctgagttgttgattttttagtttgttcagctttttacttgttagaatgaagtgatgactgccgacctccttatgtgccagactagaaactgggagtctcctatttagtcgtccttaaaaattgtaagctggacattgttggtgatgcattgtagcaattctgatttctgttacctgagagtgttgatttttgttttcactggcagctaatcagtagtcagttcccttgaacttataaagccttagttttacactttgttaggacgagtctttcagatttttcccttgatcttaggcagatccctcagtcctgggacacagtctctactcctagcatgaactgtttgtcaaagctcatgtcactgccctgtactggcaatgaagaataatcaaattctattccaaactgtaggcaaagacaacaactattaatctctactgatcaacttgactctcagccacaggtggaaaaccagtaataaaaaagggttgtctaaaggctttgagatctacccattctcctaaatatttcaaattttatttctggccagattggaccagaaggctgaatccttaggtggtatggctttgcccctatagacttccttgtattgagttgcatgttggcatctgccctcatcatatagtaaaggatgtgataagaagtcgtcagtggaaccatcctaatctcagttttatttttcataagaatgccagtgagcattccatcctacagggtcccctgtaggagaaggagccactggaagaatttctctcagattttagtgccagaaaaagctctgcttctcctgagcaactgataagtttctatctcattaatgtttggctgctgctaagctcagaagcaaagtcagtgtttaggaactcttgtaattttgagggctatcttttgctttaattccctttgtttatttaattatgtcatatttatttccatcagacccttaactgctttttctatagcaaagccaaaaaaaaaaaaaaaaagtcatcggaatcataaagagccaaggaagctgctatcattccaaacatttttgtccttcctcttctggatggctttcacagccagattcgaatccacgtaagactgtcatcttcaacccaaagtgaaatgactcacctgcctttctacttgattcaccaattggtagtcaagaaatcgattttcaaaaaaatcaaatttactcctaaagggcagaggttaaagatactttaaaaaattatatcctggctggtgtggtggctcacgcctgtaatcccagcactttgggaggccgaagtgggcagatcatgaggttaggagttcgagaccagcctggccaacagaccagcctggccaatatggtgaaacgccatctctactaaaaatacaaaaattagccgagcgtggtggcaggtgcctgtgatcccagctactcaggaggctgaggcaggagaattgcttgaacctgggaggcagaggttgcagtgagctgaagattgtgccattgcactccagcctgggtgacagagcgagactccaacttgaaaaaataattatatcctgattttgtgtcaataaagatacttgaatgaatgttctactggccctgaaggcgagttcaaggagaacttccaaatcattttagtgtggctgcagtggttcctgctgataatcccagcattttgggaggctgggacaggaggattgcttgaggccaggagtttgagaccagcttgaggaacatagcgggaccctgtctctggaaaaaaaaaaaaaaagttgggcgtggtggtgcatgcctgtagccccatctacttgggaggctgaagtgggaggatcacttgagcccaaaaaggctgaagctgcagtgagctaggatcacgctactgcattccagcctgggcaacgaagccagaccctgcctcaaaaaacaaaaacagaaatgaaaaaagcaaaacattttggaccacaggatcatcactggaaggagcaaatagattctcaaggtaatatttctttgacagagagagccatcattggaacatttggttatctggtatgtttgaattaatgtagaatcactcgcagctctcgtctttacaacacagggcaactgtcagggttagcgaggcatttgttgtcattccctctctaggtggagccagggcgtgtgatgggagcacggggcctgagctgcagcataagtttcctctgattttcaacctggaagacgataccgcagaagctgtgcccctagaaagaggtggtgcggagtaccaggctgtgctgcccgaggtcagaaaggttcttgcagacgtcctccaagacattgccaacgacaacatctccagcgcagattacactcaggacccttcagtaactccctgctgtaatccctaccaaattgcctgccgctgtcaagccgcataacagaccaatttttattccacgaggaggagtacctggaaattaggcaagtttgcttccaaatttcatttttaccctctttacaaacacacgctttagtttagtcttggagtttagttttggagttagccttgcatatcccttctgtatcctgtccctcctccacgccgacccgagagcagctgagctgcgctggctctgggcagggagtgtgccttaatgggaagcacacgggctttggagtcaggcacaggtgccagctccagcttttgaacttgggcaattgtttaacctaacctgcaagttgattttgagggttaaataaaggcatacatgaaaatgcctggcaaattacctgacacagagcagacattcaatacattttagtttccttgtttctctggttcccagtttctctggtcattttggtgtaaatccattctaattagtatttagggcagagcttctctctcttttctctttttttccttccacaaaccagtgtactcactggtctccatctttaatatgcaaacaaatcacctgggatcttgtgagaatccggattccgtctcagtagggctcgagtagatcctgaaatcctacatttctatcaaacaatgccttgaggagcacagatttagaccaaagttaggtcgttttccagatctcagagcagacgagtccatggataagtctgtggcccaatccccttcctctccttttaagggtgaaatgactgcatttaaaagaagttaaagagttcctcctgtcccctataaccacaaggaaacaaaaaaatatataaaaacctcaaaaatgcattgccatgattttattattagtgtccaaaatgggactcccaagtaataaatgatttattccagccacagccaaaaaagactttgcctggctaaaagagtctctctctaagtatgtaatatacaagaaatacaattcaaagagatgttcctataagtacattttttacacggcatatatttaaaaaggaggccccttttaatataaaattccggttatataccaatatggttaattagcatttacactatagtttgaacgtattttaaatagcatgatgtgtatacaatgtctcccgcgcccattggcaaccagggtcgtgggaagcttggtgaggagttaaccaggtcctgtggtttaagcagtggagcacccgggattcctgcccccctttctgctcacacaattgcactccattcttccgccttccttgttttctccaaaaccacctgataggggggatgtcctgatttctgaggtgtgcttctcatcatgactgcttcgttttgcccttctgatttccacggcacaagattatctaccaaaatcaaaacagaatggccttactcttctcaggaagaggctggtaggcaggtgcattatcaacaggtctgtgcccatgcagagtgagcagggagaggctgggcactgtggaatttttctgtctgaactcgctcatggccacagaatggtcacccagcttatttaggtgtagacaagtatgacacagttctagaaaatactgactataaaaatgtctctgtgtgtgtgtgtatgtatttatatgtatatgtatatatttttaaaaggctcatcttacttgtaaacatggactgctcaatcactattaaaaagtcagtttaggctgggcgcggtggctcacgcctgtaatcccagaactttgggaggctgaggtgggtggatcactaggtcaggagtttgagaccagcctggccaacatggtgaaaccccatcgctactaaaaaatacaaaaattagccgggcatggtggcgctcacctgtaatcccagctactcgggaggctgaggcaggagagaatcgcttgaaccggggaggtggaggctgcagtgagccgagatcgcaccactgcactccagcctgggcgatggagcaagactccatctcaaaaaaaaaaaagtcagtttaggctgggcgcagtggctcacacctgtaatcccagcactttaggaggctgaggggggtgatcacctgaggtcaggagtttgagaccagcctggccaacatggtgaaatcctgtctctactaaaaatacaaaatttagctgggcatggtagcatgcctgaaaccccagctacttgggaggctgaggcactagaatcacttgaacctaggaggtggaggttgcagtgagtggagatcacgccaacacattctagcctgagggacagagtgagactctatcatctcaaaaaaaaaaaaaaaaaaaaaaaagggaaggtcagtttatacccttgggcctgatttcctgactcttgctcacaagattgggactagtctcacaaaatacagagacttgtacaggttggcttgttcctgaaacaaaagcttctcatcctcccgaatgtagcagctttctaaggcaccagaaatgatcaagtctcttttctttcactgctctcagagcaaaagtaaatcccaaggaggcaagcgtgatcctacgcagggaagtgtcagtatgtgttctgaaaagatcactagtgatgacccgcgttcttaaggcagcggctcacagagctcctgtagcagactactcaggcaagcctatgtttgttcgtcactacaagagaggcgattttaaccaagctgagactccaagagccttttgtggtcctagaagattttaaggaatgtgagtaaagatgtgaattctgcacagagatttgcaataggcatgacaattcagaataaggagacagagaggaagttccctagcatccctcgctgaacatttctgccaattcaggcatgactgagatgggccatattgatagagcatcccaggagcatgcatgcctctggtccttacatggtgagatggagaagcctgcctgctactgagacagtgccttagtgggagcactgcccctcatcaccatctacctgcaggctggagggcagactgagaggttggtggctgccacgacacagccctgcacacaggggctgcttgacactcacaagggtctaacacctgttctagggaccttgttcagtgaccactctcactggcaggaagtatttcttgcgtataaataagaattcctgatgcaatttcaaccaactttcactcatttggtccttaggagggagaagaaacaactggctcatgcccagcttcctggcactgaatgggcacacaggcctcaggacaaactttcttactggttcttcaattaagcacctccccttttcctttttaccccaaataaatgatctgcacaaggtacctattattttatacaggttctttggcaaggaactacctcctagatactaatatccacattaccccaattctgtaactataagaggttgcaaggcttactgcgattacaattaagaatctaataatattttatagtagttacagacttttaccaaaattagtgaaacggaacctagtgagtgtctggatgtggtaaaccctgacagagtagaatggtcacatttgtccccacggtgtctgacctagagtgctctggatcctggaagcctcgacttcaggtaaataaccaccgcctcttgagggtgcagaagaacgccctttaaggccagttggggccatgagaacccaaaggtaaaacaactggtttatagttaggcagcatgccaacagaggttttgaagtttataattagtatttttaagaacaactgctctccgccactgagatataaacttcacttgccagccacgtctctgacaacctgcctattgaaagccagaaatgtaaaagctcacgctgcgaccgacccgcagagccgatgtgggaaatcacaaaacaacagccccagccctgcatgcagggccccaccgcagctttgttttctaagccaaatgtgctcactagagggttccacggatctgcgggagaaagaagccagacctgcactccatccttttacaattggaagctcaatggacacaaaacaatgatcaggagaagtttccataacaaagcctaatggacattgtttcagtgcccaagtggcagctcctctctggctctaggagctgatgctccaagtcttggcccaaacactacttccggccgggtgcggcggttcacgcctgtaatcctagcactttgggaggccgagacgagtggatcacttgaggtcaggagtttgagaccagcgtgaccaacatggtgaaaccccgtctctactaaaaatacaaaatattagttgggcatggtggcgcacatctgtaattgcagctactcgggaggctgaggcaggagaattgcttgaacccaggaggcagaggctgcagcgagccgagatcacaccactgcactccagcctgggtgacagagcaagactccgtctcaaaaacaaaacaaaacaaatcagtacttccatctcgaaatgatttcaggttgactatctgggatgttttgactgaagctcacaagagcggtctatatgttactccagatgggagcctgaagaatcagcagttaaggaagccccagcaggctctcaggagggaatcttgtcttcagttccaggtgatggaagaagccacgcccagcactcagccagccccgagggccctagctgtgggaacaggctgagcaggttgctgggaaacccagctaaaggtgctcgggcaagctcctgccctgcacctgctgccctccacagagcacacaattgcttttcttttctttttgagatagagtctcactctttcacctaggctggagtgcagtggcacaatcagagctcactgcagcctcgacctcccaggctcaggtgatcctcccatctcagcgtcccgaatagctgggactacaggcacgtgacaccacacccggctaattttttcttttcttttttttttttttttttggtggagatggggttttgctgtgttgcccaggctggtctctaactcctgggctcaagcaatcctccagcctcggcctcccaaagtgctgggattacaggtgtgagccaccgcacccggccacttgtttcttaatgagtgtctgcaactgctggggaggtgcgggtctgccggccagagctgcaggtaagtgagggtcaagctggttcacagagtgcagcaactcagctcagagtcctgaacacacagcccagccctctgaaaccatcccctccagcacaaggaaggcagcattctgcaaacgcatccatgggagcctcaggaaaataagttttagacaagtcacgtgttcctaccttccaggcagcaaagtcagtgctacagaagcaaagtaagggatcgcaggcctctggctggagggaggccaccaagactccctggattagtattcggtgactctaatgccatcagggtttagctcgacacctaaagcctactctgtaggattcgaagcacacagtacaacaaatatcctatggctttccaaatactagagcagagaattagttgttatagattagaaaacagggaaagggactctgcctctcgtatgaggcgaaggtttccttctaagcacacagactgagccgcccagttacgggttcctaatgctcacaggaggaaactcattctcatcatcaagacacactggtcccgtcgcaaactcatgttcaggaataacttctcctcgcagcgccccgccgtcctcagaataacctggaaaccaagaaagagacatgaaacaagcactggggatctgcttttatgccatgacctggcgggtggggagcgggggctcaaataaagggcaaaggaagcaaaggggctgtctgtcttccccctggaggtactgtgcctaggacaagtcataatcctcaccatctgccatctttaagcctgacctgcctttccacttcagatgcctgaggcatcctacctctttgaatttttctttgttgaggtagggtctcagtatgttgcccaggctggtctcgaactcctgagcctaagggatccttctgcctcaatttaacttcctgagtggctaggactacaggctctttggaaattttagtttagtttttattttttgaaacagagtctcactctttcacccaggctggagtgcagtggtatgatctcagctcactgcaatctccgcctctctggttcaagcaattctcctgcctcagcctccggagtagctgggattgcaagtgtgtgccaacatgcccagctaatttttctattttttaagtagagatggggtttcaccatgttggctaggctggtctcaaacccctggcctccagtgatccgctggcctcagcctcccaaagtgctgggattacaggtgtgagccaatgtgcctggcctcattggaatttttgaagaggcaaagggttaacaccacttgttaggaaaaagaccgtatcgtgtgatgccttgccaggttgagggtcccaggtttaaaggctattaccatggcctcacctgtgagaaaataaaaaattcaaggagagcactccacccccaggtaacagtgaagggggaaggggagggagggcactccacccccaggtaacagtgaagggggaaggggagggagcgtgcagggagaaggggagggaggtcactgttggagatgctcccctgttggccccgtgtccacccacctggcaccgtggaggctgaagatgcacttggtctggctacggtcgctgcataagactgaggtaaggaaggtctgaggtcattttctttattctcttctgttgttcctgagccaagcaagctacttgtgacaatcaagaggaggtgaaagaaaaaagaaatcatcatatatctaggacaccttccaaaggaaaagcatgaagaagcctgtgctcagctctgtgggttatttatttatttttgaggcagggtcttgctctattgcccaggctggagtgcagtggcgcaatctcggctcactgcaacctccgcctcctgggttcaagcgattctcctgcctcagcctcccgagtagctgcgactacaggcacccaccacagcgcctggctaatttttgtatttttagtagagactgggtttcaccatgttggccaggctggtctcgaactcctgacctcaggtgatccgcccgccaactctgtgggtttaaattgtagacctacccacacgctgctgggccaggatgagctgaagtgacctgcaactgccaggggcagtcacacaccgtcaaaatggcctctttctcttacattggctagacaaagattagtcctctgctcttcccagtacacacaggtgaggacatgctagcaaggagagcagccatcggtggggggcggtggcagctctggtgccctggccacagcaggagagctcagtctgtgcctgttcacagaaggcatgagtgcttttcttttgttttcttttcttttttgagacagggtctcactctgttgcccaggctgcagtgcagtggtgtgaccacagcttactgcagtcttgaccttcctgggctcaggtgatccccccacctctgcctcccaagtagctgggactacaaggcatgtaccaccatgcctggctaatttttatattttttctttttgtaaggatggggtttcaccatgtttctcaggctggtctcaaactcctgagctcaagccatccgccctccttggcctcccaaagtattgggattacaggcgtgagtcaacatgactggtagagcacttttcaattccatgcagggaataggtttttttttttttttattttgagacagggtctcactctgttgtccaggctggagtgcaatggtgtgatcatggctcactgcctcaacctctccaggctcaggtgattctcccacctcagcctcctgagtagctgggactacaggtgtgtgccaccacaaccggctaatttttgtatttgtttttggtatagatggggtttcaccatgttgcccaggctggtcttgaacacctggactcaagccatccacccgcttcggcctcccaaagtgccgggattacaggtgtgagccgccacacctggtggcagggaatatttttgaacacccactgtgagctcagggctgtgttaggagcataggctgagggggagaccatcttgtgtgttattaatcctggcacttttccagatgattaccacatgctgagggcacctgacacagagcccggtgcagagcacttgcccactagaggtttgccactgagactgccagtgaagaacaaatcaatgcaagggcactgaagcttgtcgttcttggcgaagggacaactctacacgaccagctctcgaaaggctgtcttttgaaaagcagtctcttcacctgtgggttttgattaagacacactctcctccatcctgaggatccaaattgtacatataaaggtgtccactggatgacgcaactagcagccgtggcaacttctggatcctaagggccaaggaaaacataaaccgtgatgacaacgaagatgggcgatggattcgcttccaatgacaaagcccccctcaccctagctgtcaccagattctgcctttgacaaacccttagcccactgatctggtctgggcttctggctattcctttgcattctggccttgggatctactttcaggattatttcttgtctttgaacgtgacagtgtggatgaggcaagtgagtgtagatgctgcgaccctgcgagaagcaatagctagtgaacacattagctccctacatgggacgcagtctccctctgacatgtgtctctgcccttaaccaagacagaaagggggtaaatggaggattggcttactgtctttgctggttagttttgtgaaattttaaaaatgttcaacttttgaataaactcctttaaacttcttaaaacatctgtcagccccataggagtccgaacctagaaaacagatctggaggctttttacataattacataaaaataagaattgtttttaagacagtgtcattataaccagaaggctaaaattcccatgccaacttctggctgccccctgagaatccgtattgaagtcagataggaaaagcaggggtttgattccgctcacccttcctttggggcaagttttctttttcttttttgagatggagtcttgctctgtcgcccaggctggagtgcagtggcatgatctcggctcactgcaacctccgcctcctgggttcaagcgattctcctgccccaacctcccaagtagctgggactacaggcacgcaccaccatacccggctaatttttgtatttttagtagagacgggatttcaccacgttggccaggctggtctcaaactcctgacctcagatgatctgcctgccttggcctcccaaggttccgggattacagatgtaagccaccgtgcccagcctggggcaagttttctttttttcttttcaggtttggggatttttgtgctttggaaaaatacattgacgaaagtgtggtcttgttcagagtgggtgtcattgtacgtacgttgagagggtacagatgttcctctgtccggagaagttcaagcgtgcagtggcaaaagccctgtcctgatgcatcatgtctgacacctgggtagggaggtagttggtagcagccataaacatctttcccatgtagccactccaggtcgaaggctcttctggtcgactagggagtaatgcacaggcaacgatgggactgggctgcaggccccacacgcacccaggaatctccacacccaagcgtcattagccacactccccgcagcagggagagactgtgccttagcataatgttctgcccactgagaacaatccaggacgtattattctggcaataactaaagagcatcaagggcttgtttgttcttcagaagagccattgtaaagctgttaaaaggttcccaatgctactgctttcccctattaaagaaggcttatctgatgactagtctgattcctagatttccagaagagagttagggtagagagtgagatggacttgatatccaggtaccattaaataagcttgggactgtgccgggctcatggaagaacagacagatctcaacgtgaaggcctcctgagccagactgagtgggtagcaaacctccgggcaagacactttgggtggtgtttgattgtagataaccctggagtcacccaggtacccagcatgtgtaatgatggagatcatgcaaagggacctgggatgtcgcctacagtcatggaacttcatcccaaggcctctgccagacaaagggggtgactgttctgttggtgagagacaacccccagctctgccccacacagagggtggcacattgagaaccaaggttgccatatgagttcccaggagcaggcaactgctgagaggctgcttgtctgcaggattaggtcctggtgggaagctcgccctgcagctcagagctctgggaggtattctttactatgctaccaatgggctagggggtctttggacaaacctctctgggccttcatgttctcatctgaaagtgactatgctaggtgcactgctagggttctgtgatccgaagcatcctgagacatccttgtactgtctgtcccacagccctgtgctccgggctggggtttacaaagaggtgtacgatccagaccctgcattccagattgagagagcacgggtgtatacaaagaaaaaccacgtgagcagttaatatgcggtgctgcacagatggtccaggcaggagctagtccaggaccacagaggaagggagaggcggatgaggttccttaacgtttccgtgtccagatttcctcatttgggaaacaggaatcatcatcacaacctccctgacagggttgctgggagaactaaggatgctggggactgagcatggagcccggcacgtggcgcatactgttttatgggatggtgtctctgtggctggaggaaatgaggaggttctgggggtggtggctgctgggctctgcagcaggtctgactcagggggacgggaggagctgggacttcattcccaaggtcaaaggggaataaaggtgtctgaggaggaggtgtcatgttcaaagggacattttcagaagattaatcagcaagatgatataggatggactggtattggttgaaagagactggaaagtcagaccaaatgtaagagtaacggctggaccagcacgaggtgctaaagacacgttcaagggccctggccagcgaagcagggctgaagaggcacgtgtgagccgtaaccgccggggacatatgaacacccgtggacaggttgagcggagaacccagaacagcttggaggttctgctcctggtcacctgtgctcacagacagaaacgggagagcctggagtggaaaatcaatctctgataataatccccagtggaggcggggctgcagcagcaattgcgatcactcactcgtggaaccttggggttgaacggcatcttaacagctcagccgccctctagtgctcaaacccatgacaacagatgatgaattaaggctccaaaaaagatcagggcttaagaagctgtctgaaaagtgaaagaaaatcctaaaaagtggatataatctccagggaaagagtaaaaagaacctcaggacaaacaatgagctttgggttacacctgtgcagattgggggttggaaagttctggaaagatgaaggagcgagaagggagccgcccccagtgtttcatacaccactgggggtggggggagacaaggattctagagatgaggggacgtcagtcccatggctgtgatatgtgacatggctcaggtgacctcaggcagcgtgggcttgctttaatcacacatgcctttaaaaatagctttctccaactggtggcagaaaaagatggcagaagggcaagtcagagaaatcttggcacctctctttcagccttgtgtcatgctgagaagaagacccagtcctgccattctgggctgcagaactgtgaaatcataaatgtggctgtttgcctatagtcccagcactttgggaggttgaggcgggtggatcatgaggtccgcatgtgtcagcattgataaggtgcccggcctctgtcatgtatgtgttagcatgtatcagcgtgataaggtgcccggcctctgttacgtatgtgttagcatgtatcagcgtgatatggtgcccagcctctacaccttcctcttctgaaactccatccaagggtaccagcaaccaactccccagatacagtaggctttctgtcctgatcctgcctttctctgcaggttggggtaacgttttcaaagcgctctttctctagaatccttgccccccaccgtggggtatgaaacactgggggctgctcctttctcactcctccatctttccagaattttccaacccccattctgcacaggtgtaactcaaagctcattgtctgccctgaagttctttttactctttccctagagattttatccattttttaggcttttctttcacttttcagacagcttcttaagccctgagaaattgcaggtgcttcccaagcgctcagtggtgctgctggcaacaatgataaataaatatattgttatatttacagctatatcagctaacacttcttagtgcttcctatgtgccaggcacgatgctgaacactttagatctgcagactcatttaatactactgttatgttcattttgcagatgaggaaactgaaggacacagatctaaattatcttcccgggatctctgggctcctaagaggcagagccaggacgtgaactcacgtgggtggctcccagttttttgcttttgtgcatcatgcctccaaagttttgctaacacacactccatcacttaggtgaagtcccaagtgaagccaagattgggtgttcagaaagaaaagagatcattcatgccagtagaagagcctaggcctgactcctttcgtttaatgagcatttggtgccccgcggagtacttgcctgttggtgacctgttccagcttgaagatgtgtaccgtctcggtgttactggaggcgcagaggaattgtgaatccatactgaacactagagagctgattgtcacatacctacaagcacagcaacacatgggtcagtgagcaagagaaatgggagttatggccttataactcagagatcagctttataagaaaatcagatgtatcctgaagagcctaggtagacccagatcccttaaacactgtggtgctcatatttagaaattaatgtcagaaagattcacaaagggtcatagttttttttttttttttttttttttttttttttttttttgagacagagtctctcgctctgttgcccaggctggagtacggtggcttgatctcaactcactgcaacctctacctcctgggttcaagcgattctcctgcctcagcctcccaagtagctgggattacaggcacacaccaccacacccagctaatttttgtatttttagtagagacggtgtttcaccatgttggccaggctggtcctcaggtgatctgcctgccttggcctcccagagtgctgggattacagacgtgagccaccgcgcccggcccatagtcttatttatgtgagaagaaacaaggtatagccctgcctctgtcagcagaagggaggaactgtgccttcctggcatcttggaatcttccagttgctctgtgcactgatctggctgcaaacctacatccgataagatcccaaacagtcacactttacatcgtcctttatttccatggaaggaaatcagaaattatttttggattgtgactccctggctctctcatttctcctgtgccggccgcccacacacacatcaaaaagggactctcacggctgaactgtgttaaaacagcatctcggctttcagttttgctgagccctaagtaaagcctgggagtcaattacctgggagagtagttacacttcctccaggtgagtggagggcacagagccactctctgtcctctccctagacagctgccagcggtccctgcgggacttctgcggggactttaaaatgggtttgacattgaacacagaccttttcatccctctccggaactcatagagcttttgcccatcagggacagagaacacccggatgactgtgccctggaaaagaaagcaggtggacatttcataaccattagtggctttacacagagatgtccctttagagaggagtttgttttattggttttgaacatctgtctctgaggaggaagaacaccacgttgagcatagaggcatgtttatttatgtgccatatcaacaattcttggaaaatgttataaacaccctctgtctaccttttcccttccacctgtgcccaaggctctgcgtgtatgtgtgtgtgcatgtgtgtgttcacccaactgctctggtttcttagaatttcaatttgaggccgggtgtggtggctcacgcctgtaatcctagcactttgggaggccaaggcgggtggattgcctgagctcaggaattcaagaccagcctgggcaacacagtgaagtgaaaccccgtctccactaaaatacaaaaaattagccaggcgtggcagcatgtgcctgtaatctcagctactcgggaggctgaggcaggagaatcacttaaacctgggaggcggaggttgcagtgagccgagattgcgccattgcactccagcctgggcgacagagctagactccacctcaaaaaaaaaaaaaaaattcaattggatcactttctctgattattccaggcagaagacatcaatttctctaaatagcaaagtaaagcatttggtttgcactgtactgtgtttataaggtgtagcatttgtccgtctctacggctgatgtacacgtacatttcttcataagaccacgagttttcatgcaaagtgtcttgtatcttgcatattgcaggcccctggcctattgaattaacaaatgcatgaatataccacacatgcagaggccagaaattctccctctgaaacaaattctgagtgggcccagagaccagtcagtcttcatgtcaccaggtttgttcaatcccatccctgcgcacggcaggagccatccagcgaaacccagacagaggtgttggtgggagtggactcactttttcagacgcacttgctagtttggagcctgaggcattgaaggtgatggcagctagtgttccctcatgggcagcaatagtgcagactgttttctgttggtgaaaaggaaaaatggatacagatgctgcggaggagggaagatggatttcacctccctccccttcctcttttctcctttctccctcctttgtccagctccctgtctcttcctctgtcccccaggccatctgcatgtaagctgtgtgtcattttctggtgaatcaagatttggcttcaagggccactccatttccatcccttttcctgcccttgggaaggtggccacgaacggagcacctgatgcagtgtgatgccgtcgcaggcgcgccctgcacgcatctttaggcaacttcccacagcaatcttgtcccgctcagggatgcctcagagaccagagggcagggaatatgaaacacctgcacactgtctcaggctgtggcatgggacagggtgacacattcagggagacaactggccccctgctggcaagtggttttcattatgctgcagatgtctaacttggcctggccagctggcttatggtgaggttgactcacagcaagcccgaggggaaatagtatcaccttctcttgaacaactccccagtattgcttactcccaccgcctccagcccccgacggcagggcgtccttatctatctccttccatgaccacacagccaaggcaggtgggttggctcagccaggtcaccgtcaacttaccagggagtttccatcataaagcacaatctcccctgaagtcaggcttccaggataggccaggtaagaattggaatggttgatagagagagcacatagacctggcaaagaagaaacagaacatgagaagcctggggccaagggagagattgcacggctggagagggcatctgaaaacagtacagctacagtgccacctactggcaaggggaggaatggctttgcagacaactgctttccgctgatgattcttctgattaaggcttccaataaagcaacttcacaggggaagacctcctgatttaacactggctgcgtccttgctacagtgaaacaatgagacttgccgggcacagtggctcatgcctgtaattccagcactttgaggcgggcggatcacttgaggtcaggagttccagacaagcctggccaacatggtgaaaccccatctctactaaaaatacaaatagctgggcatggtggtgcgtgcctatagtcccagctacttgggaggctgaggcaggagaatcgcttgaacccaggaggcaaaggttgcagtgagtggagatcgtgccactgcactccagcctgggctacagagtgagaccccgtctcaaaaaaaaaaaaatatatatatatgtgtgtgtgtgtgtgtgtgtatatattgctcatttttacattttaccccaggactctgaaacagcatctacttttcttccaattccattatcctctagggttacaagagatttcctcaaaactgaaataaatcttcctatagtgaaaagtcagtacatattggtctttctgcagatgattatatactgttggccagtaacttcaagttggagaagaggagctgccaagaacctatttagaaactgagaaatttcaggccaggcaaggtggcccacacctgtgatcccagcactttggcaggccgaggcaggtgggtcacctgaggtcaggagttcgagatcgggctggccaacatagtgaaaccctgtctctattaaaaatacaaaaattagtcaggtgtggttgcatgtgcctgtagtcccagctactcgggaggctgaggcaggagaattgcttaaacctggaggtggaggctgcagtgagtgaagatagtgccactgcactccagcctgggtgagagtgaggttctgtcttaagaaaaaaaaaaaaagaaaccgagcaatttctgagccaaatgccctgccttgataagggaaatgggtacctcccgaggaggaagtttatttgaggtctgcgtctgcagtcaagatggtgtgcctagacattgagacaaactaaataaagaggacattttggatttaagatgcttcaataatattccggaagagtaaacagcccatcaaaccactgaaccaacataagctgtttttatttataaggggattcaagaagggagcatttaagtaaaggattttcaaaacaatggtttagatgaatagaggtgcacatgatagcagtgaattccagcaattccatagaaaccaaagtgttaccagaaactttgagatcacgcaagagagacatctctcttaaaaaaaaaaaaaaaaaaaaaaaaagtgactggcgtctattacaagttagtatattaagtgggtttcttctaaaagtataagaaaaaactttaggtcaggctgaaacatacctcaactaatctgctgaggaaggagagcaaaggaaaaagaaagtaaacatttagagttggaacctaggtctcatttcctgctctggctttgctgagtccacagcagggctgtcctcttatcacttgccatgcatagctacgggaggaagtggctgagccccggaacctttaactgcacgttctggcagccctgccacccctttggcgatacaaggtcattcctggccccagccttagaagaggccactcgtccatttccagttttgctctggaaaccccaattcctcaccccttctgaattctttgctatccaaatgaaatttcaagaacagctaggcaggcagaagggattctagtcttgtgaaactggggagggaaggcagtcaggagatctggttgtcttgtgtgctgggttcccaaagaggcggctggcagaaaagatgtgaagactgtggaaatcttacaaggactagcgtaccaaactaaagagttaagaccttacaaatgcagtgtgtaactgctgaaggtttctcagcacatatgttttgctttgttttttgagatggagtcttactctgttgcccaagctgcagtgcagtggtgcgatcttggctcactgcaacctccgcctctttggttcaagcgattctcctgtctcagcctgccaagtagctgggattacaggcgtgtgccaccacgcccagctaatttttgtattttcagtagagacagggtttcaccatgttggccaggctgtctcgaactcgtgacctcaggtgatccatctgcctcggcctcccaaagtgctgggattacaggcgtgagccatcgtgcctggcctagcacatatgtttttaaaaaggctgtgttaaaaacacgatgagataccactgtacaaccactaggatgactatagtgaaaaagacagataaatgttggtgaggatatggagaaactgggatcttatgcaccgctggtgggaatgtaaaatggggcagtgctctggaacgtttagcagttcttcaaaagctaaacataaagttctcatatgacctagaaattccactcctacatatacacccaagagaaatttaacatatgtccacacaaaaacttgtatatgaatgttcatggcagcattattcataagtcaaaaagtggaaataacccaaatgttatcaactgataaatggataaagaaaatgtgatatatttttataatagaatattatccagcaagaaaaataaagtattgatacatgctacaacacagaagaaccttggaaacattaggctatgtgaaagaagtcagtcacaaaggaaccgatattgtatgagtctcctgatataaaatgtccagaatagagaaatccataatctaatagagacagaaagtagattaggggttgcctatggctgggggcatagggagtgatggcttagaggtacaaggtttggggcgatgaaaatgctctaaaattaattgtggtgatggttacacaattccgtgaatataccaaaagctattgaaccatgcattttaaacgggtgaattgtataggatgtgaattttatctcaaaaaagattttcaaattttattttaaggcatgtttcaggaatatttatctggttagagataggctgaggacatgagttcaagactgaggtctgctatgtactgtgaaactctggccgagttatttgctgctctttcaggcctgtttcctgtctgtgaaatgaaggctaccgtgatatagaggtctttccagatttaacacttcaagatgccaagccttcgtttcttacttcttccctctgaaaatactgggcgtgtctttgtggcagagagagctaagcagtcttggagcagaagccttggacgcatacctccagctgtgcttcagagtcttatgttaaaacataaatattcccagaagggaagaaacgtttaaactttctaagctaatattgaactttctgcaatacctattatagaactggttgacactagatgctaacaagaaagggacaaaggataagagtgagggcaggcatactctgacacataccacttatttgacagttttgcctccaggctcgcacctctaccaatccatctgaatttagacaaggaatcctgccttcctacccttacagacttaatgaaggtccccagaaaagcctactgtgacttccctatggcccaagtgtcagaaaaatccaacgagccacacgaatgtatcttcgtatcttgggaaccacccaaggcaagcaagaagagttttccttagcttggctattgccattctgccagtctcctctttctgttacaggtgttacacaaagcctttttaaggaaggatatgggctttaaaaatattattgtataatataaaagtgatggtgtagaacatttgcaaagcctagaaaatataaggagaaaaaaaatcacccacaattctaaaacccagaggcttttcactgttctgaacatctgagcatattttcttccagtcttttttctacctaggaatgaggttctgatggggcttttggatgtgttatagcttgacacatattttcataagtcactggcagctataattccactgtaattgtttggctgtaattcttctacagctggaaaagaagtgcctgctctcaactcaagaaccaatggcatcatcagtggaattcaaaggaagtcccatgattctaaatgattctcatcttggtatttaaagtattgcatgtcaaactttaggtaagttaacagtgatttataaaatgcagttccctctgagttgattaatgtctcaggttacgctttccgattttcaaaaatagaaagacatcttctttgtacagcaaatgccctatgctcctacaaaagggaagcatttataccacttttattagcattttcaaacaagaaagaggtcttgctggggaagaaaccatgaactgttcaatgatctgcattgctgtgtggtatggaacgctccctcaatatcccataaaaggtggtcagctctgtgaccacctcctccatactgggaggtctgcagttggcaggactttcatggagatttccacccttgactgctcagagcagactgctgtgctagcaggaaattaacttcgagcccctgtctggccaagctctttaaaggaaacagcctgcaatctctgacacaacaggaacgggcatgacacaaacagacagaaagaaggaaatttacagctgcgttagataccaagtgtgaggcaacaggcgaactctgtatagctaatttacttgtagtttatgaagtcaaaatgcattcaggatttgtgtgctgaagacaattagacgagtgattgtgtcttccttctgtacccagcaaggatttataaaatcaacagtcacagtttccatcttatttctttgttcagaaaataaactagaggatgagaacagataaggcgactcctggcctctggggaatgtataattggcagggcggagtcctctgaaggttcccgagtgaggacctggtcatgtcactgaagcgcagctctgacctgtgcaaggctgtcctatgggacagagagggctgcggagtgagtctgactgcccgcatggacagggcggacccacctttgcccacccaggccacaacctcaggtaacgctctccgtggcaactctgggggctaaaaatgatcatctccattttactgcagtagaaagggagctcaggagaagttgaggtgataattataaacgtgagcatttaaaacaccttgggctatatctccaaagaacatcagaggtctaaaaagacacagtttgctcctggtctttcagaagaaatactcaacctatccctggatcctttcataaggaggcattcttttatctgagacagaggaagtctctgctattgtttctcatttttcttgagataaaatcgattccctttacaaacaatatacactgtctctaacagggaacacaaatagccctgcacttttaaaccttattttctctctgtttaagctgcagaaagtaaggcaaccagtgagttttctgaactacagaaaaacaactatatttgctaaaaaataagagtaaatggtggctaagtatgctgactcatgcctataattccagcactttgggaggccaaggcgggcggatcacttgaggacaggagttcaagaccagcctggccaacatggtgaaatcctatctctactaaaaatacaaaaaattagctgggtgtggtggtaggcacctgtagtcccagctactcaggaggctgaggaatgagaatcacttgaatccgggaggcgaaggttgcagtgagctgagattgcaccacctcactccagcctgggcaacagagtgagactgtgtctcaaaaaaaaaaaaaaaaaaaggagaaacatctgtttgcaagggagggtgctcagtcctgaagcaaccctgtcctctgggggtcaagtgtgcaacaggtgtgaggagtaagtggcatttactgtccactcccctctcttcagagaaactgagagccacaggcagcttctagctttctgcatgcccgatgtccctccccaaatccctgaaggcccagctcaggccctgccagcctcaagctctatgcagattcaggggcctctcattcctgatcagaagagcacatgctcccttcaactgtgtccgcaccccagagttaaacatggttccacccctgccaaaggctgctggcgcacctgtctcagaccacctcagacagactgttgaagggaactcgtgacaactagattttgggctcctggtatgaggttgcctaatggtgcctactatggtgccaagcacaaagaatgtctgcaatagatacttgtccagatgatttcagcctctcatttctaagggaaaaacttaccacccacagcttcttcacgtaccgtcttccatttcagaaaatgtgcttcaaagtcattatctcacagaactccctaacagcctcaatggctttgttcttttatttatttatttatttttaatttattcattgttttttgagacagagtctcgatctgttgcccaggctggagtgcagtggtgcgatctcagctcactgaagcctccgcctcctgggttcaagtaattttcctgtctcaacctcccaagtagctgggattacaggcactcgccaccatgctcagctaatttttgtatttttttggtagagacagggtttcttcatgttggtcaggctggtcttgaactcctaacctcaggtgatccacccgcctcggcctcccaatgtgctgcgattataggtgtgagccaccgcacccggctagctttgttcttttaaaatatccttttgccatagctgaaatgtgaaagcactgaaatcaacagccaagggccatttatagaattggaatgaagagaaggcatcagaagtatttcatgcatggcagttcctgtgctggtcactttcacaaacattaccttgtttaattctcagccaaccctgggagatgggtattattcataagggaaccaaggttcaaaaagtctaggtgacttggatggcacccagatagatcttgaaattcagtgaaagccaaataactcagaaacagcaaatagaagcagttgttcaatgatactaaactgaaatataatagaagcagttgttcaatgataccaaactgaaatataatctgcaaatattaatctggagtcattaaatgtacaagttgttccagtgtgctgactcctcaccccaccacacaatgaaggaattctttcttgtttactcctagcttgatgaattcatataatgtcatctgctatttcaatataacaaatccaaaccattcctcttcttatacaccaggaatgtattaaatagtgttaaatcccgagaattcagtaaggtttaatatcctagcatatcgtcgaagtagagagatttctttgtcatgtaataaaacatattctttatggttcagattgtctttttgctggccatgcagacacgccaagttgaaacctgcttctaattatcacgcctactctgtactgaacgaaccacaaaaaacaattaggggtaaacacttttcaacagcagatgcttgaaatcttttacatgtctaccttacgtgccttgacacatttgctgatatgggtcccagacaaagggtgttgttattcttggactgcaatgaagggcacacagcccccctgcaggacacacagcctgacataatttgaatctgccgccattaagacaaagcttcgagataaacctcactaagactcaaaaagcaaacactgcttcacgttcgcaatttggaggaaaataaagcttgggaaagaagcaccaggacatgaaatttcagggacatttgttccatttttggagctcacctgttgggtttgcaggaatatccaggagggtcttcaacagcttcatgtctttaatgttgtgaatataaatggactcttctaggcaaaccagcagcctctgtaatcacacagacttatcagtctaccgaaccgttccttacaaagaccctgaccaaatccaaatcattcatctttcatatgagtcctaacttgattctaagcctaaagcagaattttgatgatgcattttgaagattgtgtttatggatgtacacacatacacatgtaatcatccacctgaacacaagcataaaatgcaagatcttaagaaattttattagaaattaagattgtttttacttctctccttccttcttccctccctccattcctccctccctctcttccttctccttctttccttagaacagggatcctgaacactttttttttttttttttttttttgagaaggagtctcactctgtcacccagactggagtgcagtggcgcaatctcagctcactgcaacctctgcctccagggttcaaacaattctcctgcatcagcctcctgagtagctgggattacatgcatgcaccaccacacctggctaattttgtatttttagtagagacggggtttcaccatgttgatcaggctggtctcgaactcccgacctcaggtgatctgcccgcctcggcctcccaaagtgctgggatgataggcctgagccaccgcgttcaacaggacttctgaacactttctgatcagaccccctgtgccatgtaagacaatttcatgtgccttctgtagtttccactgccatctaacaggctgcctttcagtgtttatagcacaggtctccctcctatataaaaatgggtttctttgctttctctccatcaccaaatcttaggttttacccctctctgaataattaccagctctaacttatttctactcagactctcctccaggcctgcttttgggccgctgtctgagccctggcaaagggaaaaggagaagggcttcggccccatttgaacaccccagtgccccacgtccccactgttccttcctgggctcctctctctggtgcttgctctccccactgctgccagacccttctcttcctctccacatgaaagcttgtcaggttcagagcctcttcccaatggctgtgctctcagctaagtgaaaacaggccacagggttgatgtatcgggtgtttaaaggaatataacgcatagcccagtacaagggcagacatcggtgctggtgaggaggtgtcaggaaggcatttctggttgggcagctcctcgcacatctgagcagctgccgaccacccctgcacatgcctgacttggctcccctcaggccagtgtttcttagacctggatgcccaaggagctgcccaaggagcaagccctgggctctccccggagattctggtttgggaagtttttagacgaataccaggtgattgcgatgcacactgaggctcaagaaccactggtctcagccagctccttttattccagggaacatcagctagaagggaaggtaccaaaaaataccacacaaaagaggcaggctctgctcctgggaaaagcctgccctgctattccccaaggaagactatccatggctcagaatgatgaaggtcatcagtgttaaccaagcagaaaaataaaatttaaacacatttctcaattttttttttttcagacagggtctcgttctgtcacccaggctgcagtgcagtggcaggattacagatcactgtagcctcaacctctggggctcagtccattttcccaccccagcctctcgggtggcagggactacaggtgtgcgccaccatgcctggctaattttttggtattttttgtagagacccgggtttcactatgttgtccaggttagtctacctcctgagctcaagagctcctcctgcctcggcctcccaaagtgctgggattacaagcatgagctactgtgcccagccctttctcagttttacctaaggctctgtcgtaggtctgagactggggactgagggttaaaaaaattctaacaggttctcaaaattgatgataaatatgagtgttcctctgtgaaatattctctgacttatccaatcactgtgccttttgccagcacatgccgtggttagaactacgtggttctatgcttccttctgttcagaggtttctgatatcctcttgtgtcccctcccagccccacacccaatccctgggatagcggggccttgacatatgcctctcctagaaacagcatctacatctagcccatctgatctgatctgcatttttttcccaagagctctgatggcaccatctgctctgcggctcactcagctgaatttcaggtcaccctcatgctggctgcagataagactaaacgcagagggaaacagagagaaaacactgggagggaacgaggatgcactcttagttcgtgtgagagcatgcttctggggtgggcacgatgctgctgattgcttttttaactatcagttttcagcccccgcagaaccatggtcttgccttcaactcagctccttgtctgttgctttgaatttcatctacttttctaggttttataagcaataactccttttatcaattacaaaatatttatagcatctgccctagaacaccacagatttggcctcagaggcttcgagccaatcagcctccatctggatagcaagggcccctgggaggagactgcaaaagaactgtaaaagtatgcaaatctaaatacatcatacagctgtcttgattccataaaatatatttcctcagttcaatacaagagaaataacattaactaaaaatgaaacatatgacaattcctaagtgttcttcttttttaaatttttaaatttttattttttatagagacagggtcttgctgtgtcacctaggctggaatgcagcagcgtgatcatagctcactgcagccttcaactcttgggcttaaacgatcctcctgcctcagcctcccaagtagctaggcctacgggcaagtgccaccatgcccagctaatttatttttatagtaaagacctagtaaagactaggtctcgttacattgcccaagctggactcaaactcctgggctcaagcgatcctcctgcctcggcctcctgaagtgctgggaccacacttggccctttccttcctatatacttagaaaaaagggatttggggccaggtgcggtggctcacacctgtaatccctgcactttgggaggccgaggtgggtggatcacgaggtcaggagatcgagaacatcctggctaacatggtgaaaccccatctctactaaaaatacaaaaacattagccgggcgtggtggcaggtgcttgtagtcccagctacttgggagggtgaggcaggagaattgcttgaacacgggaggtagaggttgtggtgagctgagactgcactccagcctgggcaacagagtgagactctatctcaaaaaaaaaaaaaaaaaaaaaagataaaagggattttggatccttataacaccttatccaaatctttaactttttcctgtttttcaaaaaagaaactgtgctgtctgaaggcctgaggaagtagcagactgagtgctacagaatagaacaggacacactccccttgggcctttatcatttccccagagtgggcagtcctcccggacaccacagaatccctacctggcaagagaggctgcagcagctgagttgcttaaaccaaaatttaagtcccaaacctgaaagttttaagaaaagcaaacccccaatacttcccagacctgtttcaaatcattcttgtcggagaagaaatgtaaaggaagggagaactcttagatattggttccaatgaaccgatgctcatcttggttccgacgttagatcttggttccgagaactgttagatcttggttcgtggctttgccatgaattgctgacagttcctggtgcatcagtgttctttagaaggtgggggaggagaacctcacagttaatgagtattatattaaggggaggctggcacctaaaggttaacagactcggacactcaaataggccttccttgtcccatttgctaatgaatataccagacagaaagagagaaatcatacaagcaaatacaatagacgctatttgagggttccggtctttacagatcatttgcctaaacaatcttaaaaagatcatcaggtgccaaaaacagacatttaaccttgtatacggattactactatatgcaaggataaaaagtttagcagcgaaacttaatctgctaccaacagatttcagtgaaaacacctgagtcaagaatttcatctaaaagccttcaatcagaaaactctcaaactgcctttccctcccttgccaagaatgcaggtttcttttctttcttactcctgctactccctacttaaaaggtcccacttctctttctccagctatttttcaccgcactgctttaggtggacttaagtggattttcatttgaaagagttgatcaattcaaagaaacaatcccttccttctcataaatttaaaaagcatttatttgtctcatttgttaaaaaaaattaattagtacttaagagtttagacaaagacagaagaaaacattgtcctcaatgaatgcagcaaccgctctgggaatacttaattgaatagataaatctgcatggtcacataaagaatctctttgtttatttacttatttaacagtcagtcaggaaacagatatttatgagcacgtatctaccaagcactgccttttctaccaggtcgtataatggtgaacacaccagcacagtgcctgccttcacagtaatttggccaagcgtggtggctcatgcctgtaattccagcactctgcgaggccaaggaggatccttgagcccaggagtttgagaccagactgggcaacatggggaaacactgtaatatgattcagatcagtgtccctccccaaatctcatgtcgaattgtaatcttcagtgttggaggaaggtggcagagttcttatgaatggtttagtaccatcccccaccatagagtgagtgagttctcacgagacctggttgtttaatagtgggtagtaccccccacccgtctcttggtcctgctcctgccacgtaagacgcctgctcccgctttgccttccgccatgaatcaaagctccctgagccctccccagaagcagatgctgccgtgcttcctgtacagcctgcagaaccttgacccagtgaaacctattttctttataaattacccaatctccggtagttctttagagtaatgtgagaatagacgaatacactctggcaatataaaaaaatacagaaaaattagctgggcgtggtggtgcccacctgtagtcccagctactcaggaggttgaggtgggaggattgtttgagcctgggagatggaggctgcagtgagccaagattgtgccactgcattccagcctgggcaatagggcaagaccctgtctcaaaaacagaaacaacaacccaaaatgaaaacccagcaattcaaaaggaaatctgctaacacccccaatacttactgaataagaatttatattttaaaagagaacatattgcctatttgagatcagaataatccttcaacaaagaaaatgctacaaaaaaaacaaaaagtcttcaagggttagctgggaaaaagaaaaatgagaacccaaggctgaatagcagaccttccaggagagctgaggacgtggtgggagaagggcagctttcctgacccagggagcccccacttcactctcaggcatctcctgctcagtggtattgccccaacatctgcaatgaatgacactatctagggcaaaaccagaagagtcgctcctctgatttaaggtgctcttgcggtggctcatgggactgtccaagccagagctctgacccatccctgcggtgcccaatctgtaccctagggagagggtgcagcctaccagtcagggaccaacgttctggaaacatgagccagaggtctagggaaaacaacgttacaaccagcacctggagtagactctgtttacaatacccccgggacacggggcctgagtgttaacattctcattagaattggaagcttgttttacagacattgatcttgaaagatgtccatctttttgtttggctcccgttagcagaagctttgaaaccctgagggatttccccacttacttgccggttcagccttatggacaagatgttgctggagtagctgtaattacagatctctgtgcctttcttgaagtgatacacgttcatctgccgtggttttgtgtgactgactaccaccaccaggctgctggagaagaggcgctccacgatgtagacgtccgggatttcatctgggaggaaaagcagccgggaggttacatggattgatcacttccaagaaggattccagcctccatgacactgggcccggcgcaggccaggttccaaaggttctccgggtcttgccggccaggcgccctctctgagcttgcattgacagtgatccaccatgccccccaccctgccaggtggctttttaccctctcccagggagcactttcagagtcctttccaaatatctaaagtaaagaaaacactagtggcctggcatggcggctcacgcctagtaatcccagcactttgggaggctgaggcaggagaatcacttgaggccaggagttcaagaccagcctggccaacatggcgaaaccccatctctactaaaaatattttaaaaattagccaggtatggtggtgcacacctgtaatctcagctactcgggaggctgaggcatgagaatcacctgaacccaggaggaagagattgcagtgagccgagatcacaacactgcactccagcctgggcgacaagcaagactccgtctcaagaaaagaaaaagaaaacactagtgactagactgcaagtcagagcaaaggcagacagctgcctctgatgctgtctgagtggcagaatctcccctccagaccctagggctccactgtttgctctgtcaaacatgtttggaatatttgaacaattttcatctaccctttccctgagagatttcaaaggcgtgacttctcagttgggaacttctgcttcagaattcttcttgtcctgctagaggggtgccaatatgggaggggacagtaacacagttaaatctgtactccccccaccccctatcttgctgtgctccctggatctctttcctgctgaaaaccatctggacatcagtattatgacgaggaaagtacttctgtactcaggaagaagttagttaatgaccctcctgagcacaaaggttacggctttggtatctttctgagcacattcttttcatatgtgtgcctttcttccacttggaaaaggcccacagggaacaatgtgggacagacatagagcaaaaaattcacaaaaatggtgtaataacaataacatcttacaaataaagtaggagcccaaaatattatttactgaaccactttttttccaggaaactgaaaggttgtatattgttcgctattatgatggcataaaccatcaccctgacaaaataaggaagtcacatttctagtgaattatttacagtgttcactagacatgcttcaacatcattgacatgggctatgtaaataggataccgttgccttcttcaaacaaatacttccaaaactgaatcaatgttatcagtatcttatggtgccaatataatggcaaaaataagtcacaggtggctgggtgaggtggctcacgcctgtaatctcaggactttgggaggccaaaatgggcagataactcaaagtcaggagttggagaccagcctggccaacgtggtgaaaccccgtctctactaaaaatacaaaaattagctgggtttggtggcatgtgcctgtaatctcatctacttgggaggctgaggcaggagaatcacttgaacccaggaggtggaggttgcagtgagccaagatcgtgccactgcactccagcctgggtgatagagcaagactccatctcaaaaaaagaaagaaagaaaatgtcacaagtgtcctttaggtttgacagttataaaaattaatgactgtgcatataagcatgtgaaaaagtctcaataatatgatttcacacaaataatttcttctataaaaagaaaatgttacttaaactgttgccagatctaagtgcttgtggtttaaagcaagtagtggcaacgatttatatttaaatctaaaaatcttgactccctaagtttgatggctaaggaagggaaaaataggcagcttggtagcaccgcagattaaagcctagaaggaggctctggttctcctgcagatccctgaggtctctctcacacacacttactgcttccgtggacttgatccagctgctccacagaactcagagaaaacagcttatacccggctttagttccagttgctagggatctgtggaggataatgacagcatgggaataacgacaggtattctaacaacagatctgtctgcaaatagatgccttttgccccctagcctcaggggtacagtaaacaagcatctgcaggagcttagatccttggtaacttcctaaatggtgacgcatgtcttgacaggcaggaagagcaaaagaaaagaagaaaaagtcaaaggcaacttaaaaaaaaaagtgaaatgatcaaggggcatgaaactgcatgagctctgtcatccaacaaaatgtcaaatctagcagacatgtttttcccactgggcagataacaggaaaaattgaatgtttaagaatattcataatagctgaaagctctacctccaacacaacgagggggccttcttgttgtctgagaggcactttaccagataaatcagtttttctttccttcataactttatttgtttgttgcttataagaagaaacatgctttgcttttcttttcctttttttttttttttttgagagggagtctcgctctgtcacccgggctggagtgcagtggtgccatcacagctcactccaacctccgcctcctgggttcaagcaattctcctgcctcagcctcccgagcagtgaggattacaggcatgcaccaccacgccaggctaatttttgtatttttagtagagacagggtttcaccatgttgactaggctggtcttgaactcctggcctcaagtaatccacctgcctcggcctcccaaagtgcttaggcatcagccaccatgcctggtctaagaaatacactttcaaagtaggcatagtaggtcattagtaggtaaaatttaatagatgcttcctttcatcagtttccagaaaaatgtcctgatacttcatactagtagctctcacacctggatgtatattaaactcagctgggaagtttaattggatttgaagttcaagtattctaatgagcagcccaagttggagaactctgctttctactatatcctacaaagcaatcatcacaaccaacaaacaaaatacaaactaaacatttatctaggacaatcaaagtgcctcttaaaaaaaatctggttctcttaatttttcatttttcaatgaggagataaagacaggacgtgaatccagattttcttggccttgtgttgaaagtaaacatcaaagtcaactttgttcagcagctgggaatcctcacccagctctttccagctgtgccctccgcacctaagtgatgaacagaatctgacccggagcacactcacagaagtgtgcttctctggaaggcaaggtgaaattcactctttacagggaagcatatactaaaataagcaacttactattacaagcctggatggccaaggctcttgtttcactagcctaaaaaagagaaggtcacatgattttccctggaattttttttccctacccagacatttgttcttccctgggacacagggatagggcaactacagtaaacttttaatccacaaggtagctggtgacgtctcgcagccctccaacctgctaagtagctaaactggtgggttagacatttgcagctgtgcacttagaactggcatttagtacctagactgaggtattcatgatgacaaacagcaactggaaaagtaagcccagagcatcttaaaacttcaaaatgtattttgtagtgttattgtttttaaactttcttcacataaactttttcacataaatatagatgtgtttggctgcgaaatgaggtttgtaaagtttgcaagtaaggaaagaaatactgtaactagagtcttataacattaatgcaaagtgacagcaatttaaagtaattttcaaacataagccctgctcctggaccagaagaattctacatatgagaaaatcacagagtgatgttttatgtgatgttttacgtgattgatcaatggccacaaaagactctgaatcaaggaatttagacttagaccttatttcatccataaagtctttctgtagaaacaaaattctaatcaccactcatggaaacagagcttgggacaaatatttatcattaatcaaatttaaaatgtacccaaagtaggctgggcatagtgtgtcacatctgtaatcccagcattttgggaggctgaggtgggtggatcacttgaggtcaggagttcaagaccaagctgggcaatgtggcaaaaccccgtctctactaaaaatacaaaaaattagctgagtgtggtggtacacgtttgtaatcctagctacttgagaggctgagacaggagaatcgcttgaaccctgggaggcagaggctgcactgagccaagaccacaccactgcactccagcctgggtgacagagcaagactgtctcaaaaaaaaaaaaaaaaaaagtacccaaagtgtatagcacaagtaccaatcacgaagtatgagcgtaggggactggtaagggtttgctgttttcacctaccttctttggaaatactggatcccaaattcagcctacatttatagaaaaagacatggcaatacacctaaatgtattcagtaaggggcttgacttattttaaaatccaatgtcataccctctgtggctcaaagcaactgactgtgacaagaacttttatttataggcaaggcaaagctgcccagcagagcttccatccaagaaaataaaactaacagtagggagtaaggaaattaactttcaaagcaccctaccgttttgaaaataacattcttattcaatttctgtagaaagctgggactttgcgttatttaatggctagagtataaattaacacccttttttgtcaaatctaatgatgttacaaagcagaatttagaacatttactacttacaagcaaactaaccccctttcttaacttgtgttcaattgggaaggaaaacatcacccaggcatttcaacagccatgccctcttgcaaaatgtttcttacagaacatcaggattttatctataccagcatttttataaactgcaggtctcaactcatgagtggatcctaaaacgcaattcagtgagtcacaagcagcttagaaaaaaaggacacagaaaattgcacatgatattttgtgaatagtgtatgtgttatgggtattgggtgatgttgcaatacatatttcgtattgtggattgtggtcaagaaaaacttgaaagtcactcaaataaccaagctgtagagctactcgattacatgattacacatatgggtttttcaaacaaaggcatattgttcagcaccgggtgtttttaaacagaaacataaagggaatggaagccagggtggctaatggtacataatggccttaattacaccactgaaggatcaatattagcgtagctcagtcaccagcagccaaggcacagaaactggtacagcaggaagtgggaaactgggaatcggtcatccccgcctgatgctcagggtgcacattccaaaaagatgattccatatggtccccagggctcgcttccatgaaaatagggaaagaaacaggcgtttgcctgtaagtcacagaatcctgcagatgcctgaaacacacttcagcccagctccctctcaaagcccaaatgtgaacatcgaagtaaaacattaaaaatccactcaaaaacaacagggtggagctcctgtttcctggagagaaagcagtctgcgcccgggaaaagagtcttggactccgagaaggagatcctgcctggctgggtgggcgatgtgaaaacagccaaagaaatccaaaggtttcttccatccagagcgggcaggcacgatgccctgcgtcggggatgggacaggggctggcctggccgcagggataggctgcctctttgtccgaggccctgcccagatgccacgttgagatgctcaaggacaaatgggaaagtttttcctgtactctcatcttcctgggccccaactacagagtcctgggtcaacttgcaacttcctctcctttctcatctctttcttttggccactgtctctcttccccagacacccactttggtcactggctttcccaccgccctgctccccccatattccgtggcccccgcagccccaccactccctttgcgaactccctgctttcacccttggcccaaccttgtcgctctgggaggacactgggagtggggtggggtggggggtgcggcaaaccccactgaaggggtacggggataacaagatcccaatgcgtccgaagcagacaccggccctcccgccgaggccgcctcgaggcggaagccacaagctgctctcaggacgacacccctgggtcctgacactctgtcccccacctccctggcaggggccgagtcgcagcttacgtgcagtcctggttgaaagagaagcagctgagcgccgactcaaccccgcccgggggagcgtccgcggcctcggcctccatcgggggctcggcccgggaagccgcagctcggagccggcgacagccacctcagcagcccgcccgcgccggctccacgggccgggtcgccggtcctgccccgcccctaccccgccccgtccccaccccgcccctaccccgccccgtccccaccccgcccctaccccgccccgtccccgccgcgtccccggcttcgccccgccccttctcgcccctccagctggtcccgaggaccagagcacctgatagggcggggcccctgcctccggccaccattggccacgagcccaagccacggctggcgggcaccgccccccttggccaatccgtggcagctgtgggcggacccgcccggctggcgacccgcccctggcttcgtaacgcggctctccattggacaaaggcgcgtgacgcaaaggcagcaggcccacgtggcggtgttttcattgccggagccgcccagctgggagggagagggaagaaggaatgcggctggggccagatctgctggtttcagtccggcaactgcgtcggggccgccgcaagggtgacaggaggacgcgctagttcccaccccgcccagaccccttgccatgtgtaactctgcctattaaacttacagagtttagcagagagcgttagactccaaagccccacccttttgtcgagtcctcaagccgcattgagagaagctcctgaaatggggctgcctcagccagagagatagcaagttatcttatccattgccgagcggttgagaaccctcactacttgccaagcgcgccgtactatgtatgtcatcttgaattcttataaaacttgtgtggaaaatacgattgtgctcaatatacagaagaggcaactgaagctccaaagctaaacaatttgtctaaagtaacagtaaatggtagaatgtctgcatgtctgctttcaagacctgtgcactaaataactgctaaacagtaatttgcaaaaacaacgtagcacctagcatgcgagattctaggttttctaaccaggacagaaatgactgcagcatttgacggagctggaaggtggggggaagcacctttgatctgaaaagttacaaaaatggcacaaagtatctaaacaagacctatccgatccgcagctgaaaaaaatgaaagtgtgtgtagggcagtgtagtttatgaaaggggtaacgtcttgaagatatagcacaattcaaaactcacgtaattcgagataaaccttaacaaagaatctctttttaaaagctgagtactgtacatgttcccatgcggaattactgtcaatacggtttatgaagcaggagctctgccagctttggattgtataactgctgatggatttttaattcattttttcaaattttgagatgatattttagttattgttatatgacagtctctcaaatcagcataattcaaatttattaggttggtgcaaaagtaattgcggttttccccatttcccacttttaatacccagtttatgacaaagctacttttatgtatgtgtatatatatatatatttaaccttggacctacaatagatgaacaaagggcactatttcacctaaacctttctggttggatttccggtttgtgttttctgagatgcaaatgtaacagtttcttttctcaactttattatttttttctctccactgatgtaaaaaatagttcagctcatagattcacagatgttattgctctttggctgattgtgaggtgttgtataaactatcagaagtgaatggaactgctgtttagatactttgtgccatttttgtaacctttcagatcaaaggtgcttccccccaccttccagctctgtcaaatgctgcagtcatttctgtcctggttagaaaacctagaatctggcatgctaggtgctacgttgtttggagaattacatgaagtgtaccataaagtttttaaagtgtaagctgttattatcagtttgttattaagagtttggactttatgggatagacctgggagctggtgttagtttttgagcaggagtgtttcatgataaaaaagcagtgtctttgtcagataaacttggccagggtgtgcagaacaaattagaagtgggaaaagatctagaagtctttaggggactaatgtgaaattctggaagtaaagggacaggagagactaggctaaagtgatgaaaacaaggccagaaaattagaccaaatcatagagttgttttcaggcattgctgtccagtagataaaatgagccccaaatgtgaactccacattgtaaatttcagttttctagaagatacatttaaaaaggtagaaataggcaaattaattggaataatatcatttatttaatccaatgtgtcaaaaatatcatttcaatataaagataatcaatataaagttactaatcagttaattcaggttttaattttttttttttttgagacagagtcttgctctgtcaccaggctcactgcaacctctccatcccgggttcaagcgattctcctgcctcagcctcccaagcagctgggacttcaggcccccgccaccatgcccagctaatttttgtatttttaatacagacgggatttcaccatgttggtcaggctggtctcacactcctgacctcatgatccacctgcctcagcctcccaaagtgctgggattacaggcgtgagccaccacgcctggcctcagattttaatttttttttagaactaaatattgaatatccggtgtgtatttttcacttacaccatatctcagttcacatgagccacattttaagtgttcatgtagctggtggctactttattctcagtagagtcttgagggactaaatgacaggcatggcaactgatggggaagggggaggggcagggaagaagagggaagagtcaaagctgatttcatggttgggaaggggaagcccattgggttgcttttagaaactagatcttcagtcaggtattcaggaagttgtatttcatttcagacactttaaatcagcagcagaactgcatgcttactggaatcaaggtttggatctagagctatggccacgggagaaaaatggtcaccttcccagcctcagcctttcctgtgaatggtcccccttatatgtttctttccaggctaatggtccattatggcaccagccatgtggaaataacatctcagggctgcctcatctgatttcatttttcccaagacaatatgtaagtctgtatttttatataaatctgtgcctattttattaaaaacctgtatttgtaggtaaatttaaaaaatgatgaaaactaattcttattttcaaaaagtacctcataagctaaactaaatacatcagctagctggatgtggtttgtggagggctggtttgtgatttctgttagaggtgtaagcagccactttgaagagctccaccctcaaaaaatttcccagaagtccattcatataaaaagccaagggcaaggttataaataacttaagaggtgctgaatccatttaatgtcaggctggtttttcttttttaacattctagttctgggttctgtgggagaggacactcttgatttgaatgttgggcttatgggcaacctaagtcttacaagttcttgcaacagcaatttcactactaaataacatcagcaaaagataatggggtaggtggggcaggggacaatgctttgttccagtgggaataagattttggcctttctctttctttcaactgaaattcctaaatgtctatcttttccctgaaaaacaaaacaaacaaacaaacaaaaaactccattatttctaggaaaacttactcgtaagtaactagtaagttacttaccagtcagcaaaatctgggaaaataaagctgggctctgggaattaaaaacatgtttggtaatacaaaattgcaggccacagttcatctaatggagagacttcttatttgtataacaatcaggttgtaattttaaaatgctgattagggcatgcacagggcattcacaggggaaggtggaaatgagacatcctgtctgatgcaacactcctgtcaccccatatggtcattcatggcacccaaccatctacaattaaagtaactactaggtgaacaaacaccactcctgtcctattcttctttttataaagtccattctatttttataaaatcaagttacaggaaataatctcctttctcttttctgctatggggcaacactcagaacatgaactgagaacgagttgaactctaatggaccagtgtatggtagccctttgagaaagggtaaaggaggaagggccctgggacaatggagccaagagggagagggagggaagggcgatgtgtcagtacgtggaggaagctcaaggagtcagccctatggtgccagggtagaagaggaggggttgggctgtggggtgatttctgggaaaggagatgatcgaactgattggcaagcaggaagccccagccagaagtctggccgagcagcaggtgcaactgggttttctgtttctaattatagacagtgtgtgtgagatagcatggctgcagtgaatgaagaggccctatcatgtgcccttgtcccccaaatggaaccattatttctggatttattgattaaaaggggagagacagggagcaaaaactaacaacacttctaatattccttgacttatatattccttcccaagagtcaggaaaaatgttatttcatgaaagagtgaattgatgtcttaatcttcattctctcccctcacctgtcttatttttgcctccagaatagccttcctaaaacaccaaggtgaattacaggttctcaataaatgcttgctgattggctgatgatcacgaagacagttgctttctacaagtgcttttgctaatgtccttggagctgagagtctgttacccatgccagtgcagagaggttcaatcaaggtgtttttgttcaccgaggcatcttcgcactggtcaagaacacagagacgggttcagcaggtcagccaatcaccctgccttaaattttagaatataattataggcgatacttgaaaatagaagaccaagctttatagaaagcttggtttggagcgtcatagatcttctcatgtgacgctaaccacatctatctggtctaggaatgtttatccccatcaggcagctgcatatgccaaagtggagactgtcgagtaagttgccaaaggccctaggacagtttttgatgcaggtgtagtttgtattctgtcccttccactgggtgcccaggttgcctgtcacgctgtctcttggactgctttggctcaaggctggaaatagaattggcatcttaacctgtgcttcatcctatgaagggacagaggagcaaggggtgaagagatagaggcagaattgtgccaagagggccacgggccaagtacaagggggagagtgtggagtcctgcagctcttcaaagggcaccagcactttgcctacatttaccaagggtacatctagaaatattcaaaaacgtcctttgctcccaagcagagagttagcctgtgctcctggctgggcatggcttgttggaacgtgctgtacgactttaggtttctttctagtctagcggtggtgcagggagtggtaatcattctctagaatcagtcacccctgggaagaaggtggattcaaaggctttgggcttagggtgagaggggcgtggctaagaatcccgagattcttggtgaacagtgccatctagtggtctgtatgatttagttctaggatggttggggggacacctcaggaaaaactggcttgagtgataagatatgggtagccagtcctaaagccccaaaagaaagtctctgaggctcccttgtgtatttttccaaaacctctttactgtctataaatggaaaacacagaagcctccctcaccacttcctctgaaggaggagaagtttggaaggagtttgtatattcattcattcatccattcattcatttgaccaatttttatcatgtgcctgttgtgtgccggtcatggctccaggttctagggatatgacgctgtccaaaataaataaaaacccctgcccacctgggcagagagaccattaacaagaaaaatgagatgtatagtatcttagatggtgataagtgctaagaaatgtatagcagtgaaagtgtgtttgggagtgtggggtgtagggaggagaaattttgcatagggtgggcagggaaggccccactgaaaatttccatttgaacaagacctcaggaagaaaagggagcaggttatgcagtcatatgggaaaaagctcaaagagcagcgaggaggcagggccgctggagtggggagaagagtggggagaactacaggcaaagaggtcagagtgacctgagaaatcactggaagttctgacttacactggaattcgacacagacagctgtgttgaaaagaaattgaaggtgtcttgggagattcacaattcactttagcacgttcaagtctccagaaagcccagcattatgtttatttaacattgtttcccaagtactttccaagcttatttaaagatagattccctttcttccaggaacacccactacttcatgtgggaacctgagaaaatggaaatcagctcagatgagcagactggaatgttcccaacagtcataaacaaggccagcacaaggccaggtgaaaactgtgtttaacccaaggccacactgtagctgcaaaattactgacattggcatatctaatcctttcttatcaaagcctctcccagacccactcgatttctccacttgctgaacaaaaatttctgagatatccgatgatgaaaccacctgcttcacaacacatccattcctgacctgattcctgtttcttctacctttcccttcctagcataacttaacacaaacctggcaaaaagccctttcccacagcctcttactgagatgcctcatggttcacttgatgtgcacaccctcttgctgcaggaagttaataaaactgacattgccgaggcggatggatcgtgaggtcaggagttcgagaccagcctggccaacacggtgaaaccccgtctctactaaaaatacaaaaattagctgggtgtggtggcacgtgcctgtagtcccagttacttgggaggctgaggcaggagaatcgcttgaacccgggaggtggaggttgcagtgagccgagatcgtgccgccgcacactgtactcctgcctgggcgacaaagcgagactctgtctcaaaaaaaaaaacaaaaaaaacaaaaaaaacacctaacattgaaaaggtttattcctcttatactttacctgtaggtgttatcagagcccagcgtttcatagaacgaggtgtaagaacagctggacaaaatgatcacttcctattatgaaattctgagtctaaagacattgcatccccccaaaactgtcttgtataccaatcaaaaacagcattttaagaatgaaaagggtgaggaagtgtgggttttttttttttttagacggagtcttgctctgttgcccaggctggagtgcagtggcgtgatctccgctcactgcaagctccacctcccaggttcacaccattctcctgcctcagcttcctgagtagctgggactacaggcgcccgccaccacgcccggctaatttttttttttttgtattttcagtagatacggggtttcactgtgttagccaggatggtctccatcacctgacctcgtgatctgcccgcctcggccttccaaagtactgggattacaggcgtgagccaccgcgcccggccccggccgggttatttttataagttactccttgtctatctggtcccttctgctgctaacatttttggctgaacatttgtactatgggatctcttggcttgatgagggtttaatacgcttcccttctgctgggagcctccttggactttcttgggcaatgcacagatgtctggagacagaccagattgtttctgggcaaaacaaagcacattgtctcagctttctattattattattattttttagatggagtctcactctgttgcccaggctggagagcagtggtgtgacctcagctcactgcaacctccgcctccggggttcaagcaattctcttgcctcaacctctggagtagttgggattacagacgtgcggtgcgcgaccacgcccagcaattttttttttttttttttttttttgtagagacggggtttcaccatgttggccaggctggtctcgaactcctgacctcaggtgatccacccgcctgggcctctcaaagtgctgggattacaggcatgagccatcgcgcccggcctgtctcagctttcttgagctgtgatgagtgtataggcaatggtgattcacaaaagcagacttgcatcttagaaagctccctacagcagcagtagaggatgtcggagaggggcgagtgatgggggcagagaccaggtgagaggctggtatgtcaattcaagtcagacactggaacttaggtgcttgctgtgggtggaggtagaatgtataggactcagtggcctattacatgagggaactgggagaggcaggtcagcatggagattggttgtcagtgtaacttgggtttcccctgaccttactgacttctgcgtgcaaatgggcctgtcgtgcaaatgggcctgtgttatcacttacccaaatttcaccggcttcttcctctaccttttatagaacatacagctccctccaaagcctttcctattaattactgggagtccccggaaatgcctcgcacgtgcggggacctgcccttttaggctttgcccatagggatttttgtttctgctgatgaaggcccttgtgattgatgcctaattgctgccacctgctggagtccactgtaacaacactgaagtgtttcttcccaccagtacacaccctttctgcttgtattgaaatgttatttatgttttctctctcttttttttttttttttttttgagacagagtctcactctgtcacccaggctggagtgcagtggtgcgatctcggctccctgcaatttctgcctcccaggttcaagcgattctagtgcctcggcctcccgagtagctgggactacagacacctgccaccacacctggctcatttctatatttttagtagagacagggttttgccatgttgaccaggcttctctctatctcctggcctcaagtgatccaccccccttggcctcccaaagtgctgagattacaatcgtgagtcaccgtgcccaaccatgttttctcctatcttatgttaatgtggagaattatattgagtaattttttattgaagtgaaatttacatacagttaaccatttttaagtgaacaacgcggtgacatctagtgcgttcacaaggttgtgcatccacctccgttatctggttccaaaacatttccatcactccgaaagaaaaccctgtaccccttaaacagctactacccatccctcctccccaagcccttggcaatgaccagtcagctttctgtttctatggatttatctattctggatatctcatataaatggaatcacacaatacgtggccctttgtgtctggctttcacttagcagaatgttttcaaggttcatccacgttgtagcatgtgtcggtatttcatttctttttatggctgaatagtattcctttgaatacgcatatcacaattttatacatttatcagctgagggacatttgggttgttcccatcttttggctattgtgaatatcatgaacatgtgcatacatgtacttatttggtacgtgttttcaattctcttgagaacactctgaactcctaggagtggaattgctgggtcacctggtaattctatgtttaactttttgaggaactgcaaaactgtttttcatagcagctgaaccattttacattcctatagcagcatacagggactccagtttctccatatccttgccaacacttgttattttctgtttttttgtttttgttttccgaattactatagccatccttgtgggtgtcatgaacactaaagttttatgagatgcctgcaaactgcaaacccttgggacatctaaccagtgctcgatgccccagcattctcactgagtcaaagccctactgtactctcaagatccctgtgctcattctgggtcacactcttgacacctggacaataagtttcaacacagagctctctctttatgaagctcaaatgggagttcaagaactcgatatctgaagcagatcccaggctttccttcctggcctgttctttccaatcttatctttcattctcctagctaaaatctcttgatataccaccagctctttaggtacactgggatatgattgcttccaaacttagctgcttagcttcggccggggatctctattatgcaggggttgttgttgttgttgtttgtttgtttttgtttgttcatttgttttggagacacgatcttgctctgtcacccaggctggagtgcagtggtgccatcatggctcactgcagcattgacttcccaggctcaactgaccctcccacctcagcctccacaagtagctgggaccacaggcacatactaccatgcccaactaatttatagatatacattttttttagagagatgatgttttgccatgtcacccaggctgtgatggaggtccttgttaggatggagagtggggccaatcatgcagatgatacagaaaaataaacactgaggaccagaaactttggtccctttggctgtaaggaaaaccctgtgtgacatcaaagagggcatgtctaggaggtatttgatatctgcatctggggctaagggtagatatgtgagattgggagagagatctaggagtcattgggggaagatgtagtagctgaagctgtgagaggaggcaggctgtaatggaaaatgtgtcagttggtaaagaactggaacgaaatgtcctggtttgacgttttgagtattcctttaattttaggaacactatcagaaaagaggctagcttgtgagctgagtcggctgcagcagctctaaaccacacattgctgatgagtgagaacctctgttataaatggaaatgtgaactggcaaatgctcattggctaaagctgaatgcaccagtttattttggtacctattatgtccatgatctcctattttccttattgattgcaaatacgcacgaggaataaaaagctggcttgctttccaaaaacatgactgaatgttttcactgctgaatatctaaagagggtacagattggacctttcattatttctctgaggttagaaatgtcctttggtgggtttctaatttttcatgaaaggtcagttccagagactatttacatgctgttaggaaaaacatcaagcagacaagacatatctcaaaatatttaaagtggcccattcctaggctctcagctcttctctctccacttcctctccagggatctgttccacagatgggggcttaagtcagcctctatctataggtgacccttgtctgaccttatactctggaatgctccatatgcctctgactttcatcccagggaacatcaacacccacttccgctggcattcctgatgggatctctttctcctgagcagttgaaagagtcctgcttcagtgactcccagggaaaattgagagagtcatttttttaaaaaaagagatttatcccacaccaaaacaggaatcactcattttgcaccattttaggcactgtctattttcaaggtaggctgcttttttttttctctcctgttcttccaatccatgaacatagtatagattgttaagtccttttgaagtgtaaaatttcccacaaccacatagctcaatttcttctacccccaggagcttttttttcttttaatcacattagcctgtgtatttctcccaaaacagttatcaaaactgaaattatcttgttgatttcttggtttacatgtttactatctgcctcctccatctaaaacaaagttccatgaggatggggtctcctgtcttctcctagcacctagagcaatgcccccatgtataggtgctcatgaaatgtttgttggctgactgacttacagaatcagttgcttaaatatcatacaaaactttccatcatgaatgtcctttttttttttccctctcttgagtaaggatgttgtcctgatttaactagcattattgacaaatgccaattaactgtattagtggctctcaagcttttggatgctctttacactcttaaaaattattaaggaccccaaagagcttttgtttgtatggattatatctatcattacttagtgaaatagaaattaaaactgagaatttaaaatatttattaatgcattaaagtaataataaacccattatatgttaacattaatattattttttatacccccaaacatacaaaacacagggagaacagaggcatcgttttttgtttttgcatatctctttcatgtctggtataatagaagacagctgaattcttatatctgcttctgtattcaacgtatcatatcacaacatcatgtagcctttgaaaaacccctctgtgcacttgtgagagaatgtgagtaaaaaaggcgaataacatcttagattttttttttttttttgagacagagtctcactctgtcactcaggctggagtgcagttgcgtgacctcggctcactgcaacctccatctcccaggttcaagtgattctcctgcttcagcctcctaatagctgggattacaggagcgtgccaccgcacctgactaatttttgtatttttagtagaggcagggtttcaccacattggtcaggctggtctgaaactcctgactgcgtgatccacccgccttggcctcccaaagtgctgggattacaagcatgagccaccgtgcccggcccatcttagattattttgtaaatagttttgacttcatagatgccccaagagagtcttgggtaaacccagggattgctgaagcacattgagaaccaaagattgatattagtggagaggaatatttttctttgtctttgaactacattatctttaaacactacttttctcttcgatatcctttgcttagcttaatattaaaatacatttgcattcctcaaatctgccaaaggtggccaagatacatagtgaggaaggggtgatggaaaaacaaaccaaaggttaataattcgttgcttttatacagacacatccacatacaaacaaaaaaacaataaaaacatgtgcctttgtgaagcatgcactgtgtgctctatattttccaaagattatctctattattatatcaacatttccaggcaggaattatcagcttcatttcatagacaaagaaatggaggctcagaaaaccaaaataatgtatgaaagattgccaagctaataagtaatagagaggtgactgccacccccaaatctcttttcttccaaaagcatggcctttttgaccatcaaattctagattaccacaaaatgggagggaaaaactcagaaacaatgaagagttcactgtacacattagccttattgttttgtataaatgaataaaaaaactaactcctttttttcttctagtgatgtgtaaatttaaaaattcaatgcattttttcccccagatttgaaaagtaatacacccacagcagaaaactgaaagacaactaaatgtccatcagtaggggacagggtggttgcattaattgcgacacacttgtggatgcaatactatgcagtcattaaaaagaacaaagcagctctattggtactgaaatagaactatctctaagatgggaaaaaataaggtggctcaagttctacagtatgctgtcatttgtatttaaaatgtatatatgaatatgcactggtaactggttgcttttgtgaattcagtagagggacaagcaggaggcagcttatttttctgtaaccataatctcctcctcccccagacatagaccttgatgtgtggtatggacagaaaccctaacttttcagagagcagaaccatccagccatgtgtaacatcaaaacatcactctcacagccaattcaaaatggctaagcccctctattcttttcccacctcctcctttccgttccgtctctctctctgcctgagttggggccatgagaggggattactgggagaggggggaggtcttcgccagggatgtccctgtagtactttcttgcctaatgcttttctactaggggagctctccaaatgtctgcaaatgcctgactgtctcagaggccccccacttgtggggttattcagaggactcccgtgagaccttctgaatggcctagtttcttttcttttttttttagacagagtcttgctttgttgcccaggctggagtgcagtggcgcgatctcggctcactgcaaactctgcctcccaggttcaagccattctcctgcctcagcctcccgagtagctgggattacaggcacccgccaccacgcctggctaatgtttttgtatttttagtagagacgggggttttaccatgttggccagactggtcttgaactcctggcctcaagcaatccgcccgcctgggcctcccaatgtgctggtatgacaggcctgagccaccgcgcccagcctgcactgcctagtttctaataggagtgaggaggtgtggttcagctgtcttcttgtgctcagctccttccccagtgccccacccacacaacccctttcttctgtggcccaggcaggtggcaagtaaggccattcaggatggctccagccttgctaactcccccagcctctatgactctcgaagctctcagaccctcaccttgccatgggtggagaagtcctccccacactaccatttcctcacccctccatgttctgggggacacaggtggaactcccaggaactttcctgctccgggcgtgtgagtcttcactgcactaccaagtttccaatcagggccagtgacttaacttgcagaccccagtgcaaaatggaaacgtagggtttcctgtccaaaaaacaggagaaactgctgttaaagacactaaaacataaagcttttctttaaaaatattttatttctaaataaaatgtaatagggaaaagagtgatgcgtgagcatcacacttaacttacaagttgcaaaaaagttaacattttcgtgtcatcattttatgtaatggctgggtgcagtagctcatgcctgtaatcccagcactttgggaggccgaggtgggcagatcccttgaggccaggagtttgagaccagcctggccaacatagtgaaatcctgtctgtactaaaaatacaaaaattagctgggcgtggtggcatgccactgtaattccagttacccagaggctgaggcacgagaatcacttcaacccgggaggcggaggttgcagtgagccaagatcatgccactgtacaacagcctgggtgacagagtgatactctgtctcaaaaaaaaaagtaataaataataaattgttaatgtggtatttgattgatcattagatttttctgctcacttttctgcaaattcattcactaggtcatcgacatactttcagcaacttcatttttaattgatataattgaaagtgatatcagcctctcttggcaaatgctggatcacaaataatttttaataatgagaaaaattattctgtagatgcaacttttggctcttgctacagcctccacaagttacaggaggtgacagaggaaatattagaatgtcattgtacacacttacatttaaactaaaattaagtctgggcacaatggctcttcacacctgtaatcccaacactatgggaggttgagtgggaggatcagttgagcccaggagttggagaccagcctgtgcaacatagtgagacctcaacgctccagaaattaaataaataaataaatacacttaaattcagactcacatagaactgattagtgtgaaaagataaaactactgatctagctacagatctatctgaaaacagttgatttggtaaatcaattgacctattttattatttatttatttatttatttatttgagacagagtctcactctgtcgcccaggctggagtgcagtggcacgatctcagctcactgcaacctctgcctcccgggttcaagcaattctcctgcttcagcctcccaagtagctcggactacaggcgtgcgccaccatgcctggctattttttgtacttttactagagacggggtttaaccatattggccaggctggtctcgaattcctgactttgtgatccgcccacctcggcctcccaaagtgctgggattacaggcgtgaaccaccgcatctggccaacctatctattttatatggattgttgatttctggaaagatggagagaaactggaaacggtgatttccaagtctcttctcattccctaaaaccttggaaactgggagaatgggatgggagagaacttattctttattggtataatttgccattgtttggctttttaaacatgtgcatgtattcgttttttgatttaaaaacttgttaacaagaaaaggaactcttgaagaaaaaaatgcatgttaacataagatcttcatactcagttgatcattgatactgttttcattcttgctaatctttctaaaaaccaccaaatatatttctatattcatgtgtattatacatagctatatatagtttaggtatcttcaattcagctgaaaaatgttaagcctaaacatttccaaatttagagcatttagtcacatcaactctgcttttccctggggctaagtttttggaaaggtagggagtcagctgtcatttctgctgtttttaaaaaggtgaagtgtgcttcctaacaaataaaaaggatgctgacagaaggttactttctgcgttggactccccaggcgtgtacaggaggtgtttgaggcttgagtgacttgtacagcagtgccccgggggcccgcttgatctccggttgtctgatgtcacacatagtgagaagtctggcaacaggaaggcagcgcggccttgggctgatcccgtgacgagtggtcagcagtgcaccgtgtcaggcggctctctacaaggatttctcaatcagcttatcaaaaataaataaatagggcgggagcagtggctcacacctgtaatcccaacactttgggaggccgaggcgggcggataacgaggtcaggagatcgagaccatcctggtaaacacggtgaaactccgtgcctactaaaaatacaaaaaattagctgggcgtggtggcgggcgcctgtagtcccagctactcatgaaaatcgcttgaacccaggagtggaggttgcagtgagccgagatcgcgccactgcactccagcctggcaacacagcaagatctatctcaaaaaaataaataaagataaataaatcacaatcaaaatgcccaagttttcctatttgctaacttaagtaaattttaaaaaaaatgtaatgtctttttaagttctaaaatctaagttggatttatttttgtaatgaaagaatagctcaacatctgaaaatcaatgaatacatttaatgcacttttagcatataaatcgataaagagggaaaatataaccctctcaacagatctcttagtggattgatatgtttcaaatccattcctgataaaaattctcagccagctgggaataaaagggaacttccttaacctaataaaaaaaatctaccaaaaacttctagcgaatattatacttgttgtggaaacatggaaagaatttccttggcatcaggcaggacacctgtgcccttgtttctacattgtagttaaatgggtgaattaaatcttcatatgtcaatacaaccccttgtgtaaagcataatactgaacaaagaaagcaagcaacagcaggatgagtataacatgaaacaattcctctctaagtcctgctgtatagcttcatcctagccattttattttgtttttattcattattattttttgagacagagtcttgttctgttgcccaggttggagtgcagtggcacaatttcatctcactgcaacctccaccttctgggttcaagcgattctcgtgcctcagcctcctgagtagctgggactacaggcgtgtgccaccacgcctggctaatttttgtatttttagtagagacggggttttgccacgttggccaggctggtctcaaactcctgacctttaggcaatctgccccacgcggggcagtgttgggattacagttgtgagccaccgcgcccagcccatcctagccattttgatacacagacttttcgttgtatctcaggtctaaacattttctgattttcattatagccacttctttgatacatatatttttatgcatatatatgtagaatattttaaaatttctaaaatattaagttttttgttattgttgttctctttaaagttgatttcaaattttgcagagaatatggcaatgtgatgttgattttttgggggggttattatgttttgttgatgccttctgtgtagtttaatatgttttgatgcctatggcctggtcaattttggcaattgccctatagtgtttacaaataatgttaatgcactaattgttgagtgcctagctctgtctactataatataatatttataatctactataatatttataatctactataatctactaggtcaagcttttacattatattgttcaaagcttttaccaccttgcttatgtttgggttgtgtgattgaaccaatactaggagatggtatgttaaaaactctcactatggctagaagttgtcatattctatttgcctttaccaggtatttgaaggcagaaggatctcaggttatctagcctgtcatgttgcaggaagtggaggtctccattttccccctttctttattaaaagagatatttttagaaatagataatatatgcacattgttcaaaatttacaagtactgaaaggcatgtagtgaaaagtgtttgaccccttctctgggctgtggccactcagctttcctcccggggcaaccactgttaccagcttcttaccagtccttctggaatttgtctgtccgtctctctcattttctctccttttcttcttctccttccttccctccatccttccctctctccctccctccatccctccctctctctctctctttctctctttctttctttcttagatggagtctcgctctgtcacctaggctggaggcaatctcggctcactgcaacctctgcctcctgggttcaagcgattctcctgcctcagcctcctgagtagctgggactacaggtgtgtgccaccatgcccagctaatttttgtatttttagtagggatggggtttcaccatgttggcagggtggtctcgatctcttgatcttgtgatccgctcacctcggcctcccaaagtgttgggattacaggcgtgagccaccgtgctcggccgagatttctacttttaatgtctgttttgttctcccaaattctgaattctgcagtatatcaaaataatatggcttttgctatttattcatttacaaatttttagacaaggactttcattgtcttggtacaatagagaagtcccaaacactctcttcttcagtcatatagtaattttataaatccacaacaatcatctttgcatatgacagtaatgatcataaacctttattcctttattcgtcatgcatcaaatctggttgacaatgagaggatatcagaacactcatccttccctccatcacttctaattcatttaattcttttcttttctctgctgtatctctgcttttacattttctgccattaattcatcattatcatgtaaattttattcacttcagagccaagactcactatgagactgcagttgcaccagtaaatattcagttttacaatcttaatgtcatagtctggagaatgtttcaagtgttgggttcaagtgaattctccagtttaatgctactccagatctttttccaaactcttatcagcccagcaagttgacagagttgacagatatcttttttccccgtgtgtacttatttccatattattcaacccatctggtcaaattcagattcagtgctttctggttttctacgcagatgattttcagttacttcccttcattttttctcctatgttcgatctaatgcttcaaatacaattttattcttgtttttttttttggtatatcttccatttttatttatgttatttgagatggagtttcacttttgtcgactaggctggagtgcagtggtgccatctcggctcactgcaacctccacctcccgggttcaagcgattctcccacctcagcctcccaagtagctggacttacaggaacacgccactacacccagctaatttctgtatttttaggagagacggggtttcaccatgttggccgagctggtcgcaaactcctgaactcaggtgatccgcctgcctcagcctcccaaagtgctgggattacagaggatggccgctgtgcctggcctggattatattttcaagtaagctttaacaaactgtacttgagacacaactttatgagtcctttaatgccccaaaatatctattatgttttcacatgttctttgatattttggcttggaatgtaatattttgtttaaaaacatttttcttggccgggtgtggtggctcatgcctgtattcccagcactttggggggccgaggggggtggatcatgaggtcaggagatcgagactatcctggccaacatggtgaaaccttgtctctactaaaatacaaaaaattagctgggcatggtggcgtgcgcctgtagtcccagctactcgagaggctcagacaggggaatcacttgaacctgagaggcggaggttgcagtgagctgagatcacaccactgcacttcagcctggcgacagagtgagacttcgtctcaaaaacaacaacaacaacaacaaaaaacaaaccaaaaaacccatttttctctcaacacatcgaaggcaatatcagattgcattctaacatccactgtgttgatgaaagtttgtattgcgatctgattattgttcttttgttatgaccatttagaaatatgtgtgtgtgtgtgtgtgtatctgaatgtgtctatattttatattcaatgttcagaactttcataatactaggcctaggtgtgttaaaccctatggttttagtatgtatatgttggacagttttgttttttttttttgagacagactctcgctctgtagcccaggctagagcacagtggcacgatctcggctcactgcaacctccgcctcccggattcaagcaattcttctgcctcagcctcccgagtagctgggattacaggcacacgccaccatgtctggctaatttttgtatttttagtagagacggggtttcaccatgttggtcaggctggtctcgaactcccaacctcaggccatccgcccaccttggcctcccaaagtgctgggattacaggcataagccaccgcgcccagcctaggcagtcttaatccatttctccatgtagatttactgtagggaaaaaacttagaatgctttaactatagttatccacattctctttttgtccagtattttagtttctacattgttcttatacttttcacattggtaattacagctattatttttatccagtaaaaacttgtttaggtttattcacagtcttaatattttcttttgtttttatttcttgtgttttattccttcatcttcgtactgtgaggtcagctgtggattgaattgctgttccattttaggtacagatgacataatctctttttcctcttgttgctttctacattttctttttgtatttggtgattttgcaattttgctttgctattttttgggtttggatttatgtattctgaatgggaactggcatgttttccgatgctcacatctatagttttcatcagttttggatgctatcagccatcatgtttcagatacttcttcctcatcatctctggggttttcattgagaatatgttatttttaaaaatgtacttcatcctctatgactcttaactttcctattttccagtttttatttttctgtgctgtattccatgtaattttatcagtcttttcttcaaatttacacattttctatttttctgcatttaacatcctgtttaactagtctactgagattttaatttcagtgattcctatattagtccattctcacactgttatgaagaaatacccaagactgggtaatttataaagcaaagaagtttaatttacccacagttccacatggctgggaaggcctcaggaaactttcaatcatggtagaaggggaagaaaacacgtccttcttcacatggcagcaggagagagaattgctgagcagagggggaaatgccccttataaaagcaccaggtcttgtgagaactcactcactatcatgagaacagcataagggtgaccacccccaggattcaattacctcccaccaggtccctcccacagcatgtggggaatatggaaactacaactcaagatgagatttgggtgaggacacagccaaagcttatcaatctcatgtttcatttctagaagttatttgatccttgaaaaaaatatagcagttcttttaaatcctagggttttccccttagattctttctttaatgtcttcgattatgtaaacatacttgattgaaagtatttttggactgttttataatttaaagttttgagcattaatattctattgcgaactcatcttctgggtagtgctatttatgagaatccctgtggcctgagttatgggaaggaccttccagggaggtttttgtttcttctgttaggtgccccagggatatcattatcccgggacatttttaaacattaatttatcagttcaggggttcccagacaaccctgctactatatatttcagatccaaacccactggaaatgcaggctagggggtttagtttctcaggggaaaactattttacccagactcagatgacacaagcttttttactttttttgaaacagtgtctcattctgttgcccagactggagtgcagtggtgcaatcatggctcactgcagcctcaacctcctgggctcaagtgatcctcctgcctcagcctcctgagtagctgggactacaggcatgtgccgtgaggcttggctgatttttgtaatttttttgtagagatggggattcattatgttccccaggctggtctcgaacttctggactcaagcaatctgtgtgccttggcctcccaaaatgctaggtgcaagccaccgtgcccagccaacacaaggatttttatcttcctgagctactggataattttctacgtttttacttggtagtagaccttgaaagtcctcagttttattcaggaatcttagattcaattctctacctcatgcaggtccacagcttcatctctatgtctacataggtaagaaaatataagcctgtagcttatcggtctaacagtcaggtgtctccctacccagttatagcaacagctcaccctcttgtgggtggttgtattttcagtgccatttttgtttgtgctttttattttgcctgtttgcctgtggcatgtttttggcccttgaggtttccctttcctctttgaaagcttagttacgcattaaaaccgcagtccccaacctttttggcaccagggactggttttgtggaagacaatttttccatcaaccaaggtaaagtgggatggttttgggatgattcaagctcattacatttattgggcactttatttctactattattacatgtaatatagaatgaaataattatacaacttaccataatgtaaaatcagtgggagccctaagcttgttttcctgcaactagacggtcccatctggggatgatgggagatagtgacagatcatcaggcattagattcttataagaagcacacagcctagatccctcacatgcacagttcacaatagggttcttgctgctataataatctaatgcccatgctgatctgagaggagcagagctcacagtactggtctgtagcccagggttgggtacccctgcattaaaacattatattaattgatctagaatttccaggtagccagacatttttctctttatcatagtcttccatctttctggaaccctgggatagttattcatacagccattcattcatttttttcgtgtgatattatttaggcacccattgtatgctggtcagtggggatatacacagttgaatagaccatgtcaaagccagtggaagcttgagttgacaaggaacacttctcggatggatggaacttaaaccgagatttgttgattacggaaaaggagacatatgtgtgtcgagtgcttgcttggtacgtgctaggcaatgcgctaggtgccagggcacaaagtggaagaaatgccctacctttaaggagtttataatccagtgggtggaaccagagacagactaggagatgggtcctgactgtgtggcaagtgctgtgtgttccagtgggggatgtaaaagccaccaggggagcaagaagacagggcaggtcagagacgatgtctccaaggagatgttggagttgaattttgaaagatgagtggcggtgagtaggatgaagcgacagggaaaaagacagacggatttgactgcatgtaatttaaaacttatgtcgtctttattggcaatttactatatgcctggcatagtggtgcatgtttgcacacattctcattttagcttcacaaaaaccttacgaagatgttattactctttgacagacaaggaaactgaggctcagttgtttgcccaatgacacacaactgttgggaggtaaaactggaattcaaatacagtttcatctcatttatatgctataatatagaaacaaggattattgggactttttttacggtgctgtaataaggaagcaatcactagcttttcaagaggaaaaaaataaatattttaaatggcaaagacatttaggattttaaaattcctctttgttttcaagttttgtacttccttcactctggggcaataaccctagacaccgggtgaaggttaaatagctcattaagcttagcgttatcaaaccaaatattgcccgtacaataaaggtaaaaagaatgggcagaaaaggaggctttgtgtgtctatccattggctcccttatctgtttttactaaggtcaatcggtggacaaaggaagggccagatgtcctcaaattgccttcagcatataaactatttgctctcagcaaatatatcaaccattcccacactggggtgacagaccacctggagcaagctatgagttttccaggcagaaagtatttctttatgattccagcttgatgtctgatcatatctggatgtggctaattgtttgtccttagttttgaggaagtccaatttatcagtttttttgaacaaatcatgctgtggtgtcaaacataggaaatcattggctaacttaaagtcagaaaagaatttcttatgttgtcttctacatattcgttagtttagctctacattgtgatccatgatctagtttgagtttttttttttgtctatgatgtgcatggacccaagttcatattggttcatacaaatcatcaaattgctccagcaccgggccaggcgcagtggctcacacctgtaatcccagtactttgggaggcagaggtgggtgaatcacctgaggtcaggtgttcaagaccaccctggccattatggtgaaaccccatctctactaaaaatacaaaaataagctgggcatggtggccagcccctgtaatcccagttactcaggaggctgaggcaggagaatcacttgaactcgggagacagagtttgcagtgagctgagatgacgccactgcactccagtctgggaaatagagcaagactccgtcttaaaacaaaacaaaacaaaaaaagcttcagcaccatttgttgaggaggtggtcctttttcactgcattgccttcacatccttgttaaaaatcaattgtcaggccaggtgcggtggctcatgcctgtaatcccagcactttgggaggccaaggcatgtggatcacctgaggtcaggagttcaagaccagcctgaccaacatggagaaaccctatctctactaaaaatacaaaattagttgggtgtggtggcgcatgcctgtaatcccagctacttgggaggctgaggcaggagaattgcttgaacctgggaggtggaggttgcggtgagctgaattcatgccattgcactccagcctgggtaacaagagcaaaactccgtctcaaaaaaaaaaaaagaaagaaaagaaaaaaaatcaattgtccatatatgtgtgtgtttgtttctagactctgttcagttcattgatctatttgttaatatttatgccaataccatgttgttttattactggggctttataatgacttttgaaattaggtaccattagccctccaactttgtttttgttattctaggtatttgtgcctttccttatgaattttggaatcagcttgtcaatgtctacaaaaaatccacaaacaactgcaggcatttttattgggattgccctgaaactatagagtaatatgggggagaactgacatcttggcaatactgactgttttggcacacaaacaaattaaatctatccatttatttaggtctttaaaaattcatctctgtaatgtgttgtggtgtccagtgtactgctcttgcacatcggtcagatttatctttaaatgttttgtatttttgatagtattagaaatgggagttttaaatttaaaatttttcattgttagtagatagaaattcaattaatttttttattttgactttgtatcctacaaccttgctaaactcacttatcgtggtatctttttttttttttgtattccatcgggttttctacaattttacttcttcctttctgatatggatgccttttatttcttgcttttgccttgttgaactgactagatcttccattataatgttaaataagagtgatgagagtggatgaccttgacttgatcctgatcttagatagaaagcattcagtctttcatcattgagtaaaatgttccaggtttttcacagatgtcctttaacaggttgaaaaagctccatttgggtcagttttggaatctcatcaaatgtagcaagaaaggctgacaaacaaagtagtgttttccatcccgacagagaaagcaagtgagggtgaagtctcagattctggagacaatccaaactaacaaaatgtccctaaatttgtcatgaaaataaaagtggggagtcaaaggatattgttcactttcatagttcaaggcaaagttaaatgtgctatgttcactttaaaatgaatgtgttttctgccacaatggcaaagaattaacaaattagcaatttagtttgtaagagatccacggaatatattaagacattgcagatgttatctgttttaccaaggactcaaagaacaacttgaacttctatgatttgctggattcaagggcatactgtgggctgcctttctgctaattagattattttacccaccaaactatcatggaaaaatgatcaaacaagcagtagtttacgcacatagaacaatttgcctagaattgaaggtaagctcaagacagatggagagtgggaaacaaagatcaacttcgcttccacaaatagctgagtgctgagtgacccctaaaatgagctaatattgggcaaggatattgtcctagacctcagagttcccctttatccttggattgtgttgtataatgcagcagtgggtttgcttggtaaaagagaaagagcaaagtaaaaaaggggaagacatctgttacttctattgagttaagccttctaaaaatatttcccttttagtgaccacttgttattttgaccctttgatcttttgctttggaaataggacctttgaaactcttctgctttcctccctgtgtttgtaaaatgatgataatgcccgcaccacagaagaagagactccgttttacatccaaagcttttggagataaggggttgaagtggctgaaggagaaaacactccaattattcttgcgaggcataaagaattacagtttttcatctaaaactttacttagaatcattccactgatcctaaagaaacatactttaagtttctttattttgagacagagtctcactctgttgcccaggctggagtgcagtggcgtgatctcagctcactgcagcctccaccccctgggttaaagcgattctcctgactcagtctcccaagtagcggggattacagatgcgtgccaccatgcctggctaatttttgtatttttagtagagatggggttctaccatgttgatcaggctggtctccaagtcctgacctcaagtgatctgcccgcctcagcctcctaaagtgctgagattacaggcgtgagccatcgtgcccagcctaagtttcagtgatcgagccccacaatccataacatgtttagtgattcagtgaactgttgattcatcaaagggaaagaagacattctcccagcaatcagccactttgcaatcagtttcacctcagtcacactggtgcctggactaagagaagagctcatgaggtttttttttttaatgtccgcataattaaggagtcttggacatatacatggctttgcaggaaactgttctatgaagtgattgggctgaagtctgtcacagcatcaggaggcacaagctccttatcttggggctgcctcttcctccttcttctcatccccctcttcctcttattctttctttctttctctttctttctttctttctttctttctttccttccttctttcttttccttccttccttccttccctctttctttctttctttctctccttccttccttccttccttccttccttccttccttctttctttctttctttctttctttctttctttctttctttctttctttctttctttctttcttctttccttccttccttccttcttctgctttccttcttttctctccttcctccttctccttctcctaattagctttctcttccctcttcctattataaaaataaattatgctcattgtagaaagtgaaaatatagtgtgactgtgtacttttgctctggaatgaaacttgagctgaaaatctggttccattgctaaccagctgcattaccttacagaagtcactcatctaatatgcctgtgcctcaggtacccaagtgttaatgggtatactaatgctagttacctcccaaagtcgatgttgtgcggatttttttttttctcagatgatgtcttgctctgtcacctcagctggagtgcagtggcatgatctcggctcactgcaacctccgcctcccaggttcaagcaattctcccaactcggcctccccagtagctgggattacaggtttctgccaccgcacccggctaatttttgtatttttagtagagatgggatttcaccatgttagccaggctggtctcgaactcctgacctcgtgatccgcccgcctcggcctcccaaagtgcagggattacaggcgtgagccactgcgcccggcctgttatgtgaatttaataagacattcatgtacacacattgcacagtgcctggcacatagggaaatctcaaagtatggttttgttaataaaaatcagaaaaatgtagataaccaacattataattcaactgctgggaaataaactttacctccaggtacatttttacattctagtgttttcaaatgaaggctaccaagttaattaatcaatacttacttagcctaacactatggtatatattgagaggcatatagttataacttaagccaacgtttcctgactttctcctgtgctaataatttttctgtattcattcattcattattgacttattggaaaagtggtttggggtcgggcgcggtggttcacctataatccctgcactttggggggccaaggcgggtggattgcttgaggtctggagttcaagaccagcctgaccgacatcgtgaaaccccatctttactaaaaacacaaaaattagccgggactggtggtgggcacctgtaatcccagctattcaggaggctgaggcaggagaatggcttgaagcaggaggcggaggttgcagtgagctgagatcacgccactgcactccagcctgggcgacagagtaagacctcatctcagacaaaaaaaaaaaagaaaaaagaaaaaggaaagaaaagtggttttgtggttattttgcattttctttgtgccagatagtgttctgggtatcagaggcataacagtgaacaacaataataatgaaaaaaaactcaaaaataaataaaaaaaatgcactcatgaagcttacgtttgtatgaaagagagagagagggaataaacagactagagaaattcatgtaatacgtcagatcgtgataaatatgaagcacaggggagtaggggggtggcatggggagagttgcaatttgaagatggccaggtggcttttgagcacagacccaaggaagtggggcagtgagccctgaggctgtttggggaggtctatgtttcaggtggagggaacagcctgccctgagatcgaggtgggcctggcttatttgagcaacagccaggatgtctgtggctggagaaaggtgggagcaggagagaagagctgaggtctgagtctgacagtggccagatctaaggagcttgcacgccattgcaaggcttctctgtcccatatatacaacctgattggcttctggcctgctttgacctatgaaatgagagaggaagtggcaagtgtccctctcaggaagaagctttaagagccagcatggggctgggtgcagtggctcatgcctgtcatcgcagcactttgggaggccgaggtgggaggatcacttgaggtcaggagttccagaccagcctgaccaacatggcaaaaccccatctctactaaaaatacaaaaaaaattatctggatgatgtggctcaagcttgtaatcccagctacttgggaggctgaggcaggagaattgcttgaactgggaggcagaggttgcagtgagctgagatcatgccactgcactccagccagggcaacagagtgagactccatctcaaaacaaaaaaaaaaaaaaaaaaaaagagccagcgtgggcttctccatcattcctttccctctgccacatggttctataaagaggtcaccttttagacctgagctctggagtgaagaaactatggaactggatgtcaggctccctggtggatatggtgtgagaaataagctttcagagggctctttctctatcctgtgtctgaattgggcttgtcttgaagctgtgtgtgtaaagcactttacacaatttttaaaatatttattttttattttttaaaaatttgaaaaaaaatgctcagatttttcctaaggcttgtctgaataagtttgggctatttctaaaccccagaggtggggctgaccagattgaagttatcggttaaagatttaggtagctttcctaggagaaataggatagaggttgggtaaatactaagtgagcacccatcttggaaagtatatatatatatatatatatatatatatatatatatatatatggaaagtatatatatatatatatatatatatggaaagtatatatatatatatatatatatggaaagtatatatatatatatggaaagtatatatatatatatatggaaagtatatatatatatatatatggaaagtatatatatatatggaaagtatatatatatatggaaagtatatatatatatatggaaagtatatatatatggaaagtatatatatatataaatggaaaaaatatatatatatggaaagtatatctatatatatagatagtatatatatatggaaagtgtatatatatatatgtatatatggaaagtatatatatacacacatacttctctttttgagaaagagtcacccatgctggagtgcagtggtgcaatctcagctcactgcaacctctgcctcccaggttcaagtgattctcatgcctcagcctcccaagtagctgggattacaggtgcgtgtcatcacacccggcaaattttttttttttctttttagtagagacggggtttcgccacgttggccagcccggtctcgaactcctgacctcaagtgatccacccaccttggcctcccaaaattctgggattataggcgtgaggcaccacgcctggctggagagtatatttttgctccaaagaggtgtggggtatttagatattaccagggactggtgggagaatggtaattggtcccttaagtaatataaaggggtgtgaatcttttcttttagagagagggaatgccatttgccctgattactcaacaggatttggaggagagttgtttagaaaaggagatgagcacagaataggcagcttttgaacccaaaagggaaatgtgtcattttacttgcctcccttggcttgtcttgttgatgacgatgtctggtttggaagccagccggcctgagcagacagcccttcagctccaggctaacaggggttgggattctgtcccagggtccctttggccctctgggcagtcccatttcactggctgagcttgtggcagagggggcaagcgtgcggggcctttccccatttatcccattggggccctttgttttccagtgtcctggctttttgtacctttggcagttacctggaggagtatccttagggcaacatggagagtgctggagagcttgtaaagcagccagttgttgaggttgcctcttgtcccgcatttctcctttttcttagccctgtcctcctattctgatctgggttataaaagacagaggaggctaatctgaggacctcctgcacagggagtgttgggttccatggctgagttttgtaatttccttccagttcatttttaggccaagcagtatcacaaaggaaaacttttttttttcttaaggtttggggtaataaaacttttcccagttttggggatgcatctgaggggcgtgtcctgtggtatggagatgcgattacccatctgtgaagagagaatagaggagaaaaaggaaaaaagaaagcactccctctactttcctattatcctgaatggggcatccctcatcatcctttgggttccagaatgaagcagtcttatcgtgtacccttggccccatctcgtcacattacccgcttgagaacagaggagatactggagtgaagagtgggtcccatgtttatccttgaggttctagagtgaactgtcttactgtatacctctaaccttgccttcatctctgttctaatggtaatctgttagcctgggatcagccttcatctctgtcctatgggtctcctgtgcctgtggccttggaccagcctgtatccttgtctccaagactctcactcagagcattttagcaaaaaaatgattatttctttctttctttttttttttttttgagacagagtctggctctgtcacccaggctggagtgcaatggcatgatctcagctcactgcaacgtctgccttctgggttcaagtgatttgcctgcctcagcttcccaagtagcttggattacaggcatgtgccaccatgcccagctaatttttgtatttttattagagatgggatttcaccaagttggccaggctggtcttgaactcctgagcttaggtgatctgcccgcttcaacctcccaaagtgctgggattacaggcgtgagccaccgcgcccagccaaaatgattatttcctttgtcagatgcctagttcccatgttcttcaagtagacaagaagcctgtttttcagctcactgctgcaaaggggctggacttccctccctgcaagatttgaatatgaccttgcaggacttgatgcttgttgagaagggcgtggaagtaattagagaagtggaggctccaggaggaagtgggaggaagtgggaggaagtgagaggaacacttgtggaaagccttcatatgcttgcaaaaagagcagacctcggattcaagagggcaatattcatttgccctcttgacataaagtagcaacctctggaggacttggggcttggagtaagaactcacaaatagcaaaagcagaatttcccctcctcccaagtggtgctaacgcacaaaaaaaaaaagaaaaaagtaggtgggatccttaaagggccagaagaaggccctatggaggtggacaaactgcttcaaaagccaccagaaaacttggtcctgtggcataacaggaacaaaaagcatatggtaagtcataaggagctggcagagccagagttccagttagtgtctgtcctggccatgggccagcagacaggggaagggttggaggtcatccaagctgttaggttaaaaccaagtataaatctcaggagatatccgcaaggaagcctgtgtcttttctgccatgcaaaagccgcaggcacatgaataacagggagcgtgtgtttaagaagtcatgtggcattcgaagtgaaagccaagtggctgacttgctcctgaggccgatggttcattcggcaggtgctcaaggccgcttttcaggagacacaggaaaacagaagaacaggcagtgcgggttcttgggaaagagccgatcttatttgaaaaagcagaggacaccccagatattgcacggtttgaggctttagctttaccaccctcatgagcctcttgtccaggagggtcattagtgccttagttctacttggtgcagaccccaaggttcttcccacccctgcgagccagccgtcagggtgagcagaaaatcagccatgggagcagagccactgtgactgagaggaattgttttgggcgttggttagtgagcaggagagcgaaagggagaagaaaactgtacaggggttgaatgcctgcagctgaagaaggtgtagagatctctaaccactagggaacatatgtgagctatgcagcgccaaagtgtgttagcgcttgggaacgtatccaagtcacacagcacccaagtatgctactggcggtgaatctgtatcagtatgagtctgcagcaacctcaattcttgcctcctcagaagaaagaatttgactgaggggcataaggcagaaggagagaccaaggcaagttttagagcaggagtgcaagtttattaaaaactttagactccatccaggtccctacaaaggacatgatctcattccttttttatggctgcataatattccatgatgtatatgtatcacattttctttatccagtctgtcattgatggacatttaggttgattccatgtctttgttactgtgcatagtgctgcaatgaacatatgtgtgcatgtatctttatgacagaatgatttatattcctttgggtatatacccagtgatgggattgctggtcaaatgctatttctgcctctaggtctttgaggaattgccacatagacatgtggtgggggggaataacacacattggggcctgtcagaggggtgggggttgtggggagggagagcatcaggaagaatagctaatggatgctgggcttgatacccaggcaatgggttgatctgttcagcaaaccaccatggcacacgtttacctatggaacaaacctacacatcctgcccatgtacccctgaacttaaaagttgaagggaaaagaaagctttagagcaggaacaaaaggaaggaaaatacacttggaagagggccaagcaggcaacttgaaaggcaagtgctgtgtaatattttttaaaagttaagttgtccatataaaaaaattaaatagggagaagctcatggaatagctgattccccccgcacgtgttcttacttttttgcagccaagcctcggagtggccactcccggcgctgtagcaatcgcttcccactttgtctccttgccaaactattctttgcactgatgccaaagatatttttcaacttgcaatttttttttttttttgagacagagtcttgctctgttacccaggctggagtgcagtggcgtgatctcggctcactgcaacctccgcctcctgggttcaagcgattctcctgcttcagcctcccaagaagctgggattacaggtgcgtgccaccatgcccaggtaatttttgtatttttagtagagatgcggtttcgccatgttggccaggctggtcttgaactcctgacctcatgatctgcctgccttggcctcccaaagtgctgggattacaggtgtgagccacggcacctggcccaacacgcaaatttaatagtatctatttcctacttaaagcccttgagtggaaaagcatgaagataaatggagaatgtggcaacatcgtccatcaaaaattttgaaagaaaattcttcacaacgttgtgaatagtttctaggtgggaggattatggatgattttaattttcttttttgtatttttctatattgaaaatgtttaaaaatatataatcaaaaatgccatttactggctccctgttctagttgcggcacattaaagacagccaaagagctttaacactctttccgttgacggactgggtttaattcccttccccttgaatctaggctggcctaagtaatttgtttgagtaagaaaatatgggccgagtgtggtggctcatgcctgtaatcccagcactttgggaggctgaggtgggtggatcatttcaggtcaggagttcgagaccagcctggccagcatagagaaacctcatctctactacaaaaatacaaaaattagccaggcatggtggtgggagcctgtaattcccgctacttgggaggctgaggcatgagaatcgcttgaacccaggagttagaggttgcaatgagcaagatggcactactgtactccagcctgggagatagagggagactttgtctcaaaaaataaataaaataaaataaaatagcaggagtgctgtgctgggacttcaagggtaagttataaaaagccatgcagcttttgcctgcctctcatggaacattctgtctggtagccctgaccactgtggaaaagttggataccctgagacttctgtaatgtaagtgcccggcaaacggtctcagctgggcctggtatatcaatcctccccaccaagcagaagccacttggtatccttcagaccagcccatcctccaggtgaatgccacccctgacctcagtcgacaccacatggaacagaagaatccccctagctgggcctgccaaatgtcctgctccacaaatgagatataattattgttttaagccttatgttaacttgttagatagccgtagataattggaattctattaaacaaagaaagtcttcttagcagggctaagatcctcctagatctggcctctgtctaccttcccttcctactgtactcttctttatatctcaggctcttttttttgagactgggtcttgctctgtttcccagactcgagtgtagaatattttagccttgaactcctgagcccaagaggtcctcccgcttcagcctcccgagtagctaagactacagatgtgtgccaccatgccctgctaatttttttaaaagtttcttttgtagaaatggggtctcactatattttccaggctggtttcaaactcctggcctcaagtgatcctcccaccttggcctcccaaagtgctggggttacaggtgaaagccatcatacctggccccaggcttcttctaggttcctgaaccaactatagtctttaccttggtgccattgtctataccagcctccttttcttatttattccatttgcctggactgacgttcccatccttactccattcctctgtcctcacctgtctatcacaccaccagctcctccatctccctggtaaattcttgttgagctttcaaaatttacctctgatggtgcttctggaaagacttacttcttcccatacagggttctatatcttctctgtgctaatgtttgtattgcacgtgcttctcttattatactcatttactcatcacatacattgtagcacatttgttctcatgtctatttcttctacttatctgtgtattagtttcttttgatgctataacaaattacagaaaacttagtgccttaaaaccatacaaatttattatctggaattctgaaccttagaaatcctaaatgggtctcaataggctgaaagcaagatgttggcagggctgcatccttttctgaaggctctgggggagaatctgttttcttgccttttatagcttctagaggcaggccacatttcttggctcctggtccctctctgcgtttcctttcctttcctttcctttcctctcctctctcctctcctctctcctctcctctcctctcctctcctcccctcccctcccctgcgctcccctcctctcccctcctctcctctcctctcctttctttctgatggagtctcactctgtcacccaggctggagtgcagtggcgctatctcggctcactgcaacctccgcctcccggggtcaagcaattctcctgcctcagactcctgggtagctggaattacaggcgtgtaccaccacgcctggctaatttttgtattttttgtacagatgtgttttcatcatgttggccaggctggtcttgaactcctgacctcaaatgatccacctcccttggcctcccaaagtgctgggattacaggcatgagccactgcgcccggccctctctgcattttcaaagccagcaatggccagatgagtcttcctaatgctgcatcactctgatactagctttctatcttcctcttccacatggaaggacccttgtgattacaccggccacgtccagataatccaggacaatctctgtattttaagatcatctgattagtaaccttaaattcatctacaatattaattcccatttgccatgtactgtaacacttcaacatgtttttgggcagtaggacgtggacgttcttgcaggggtcatcatttggctgactgcagtctgtgagctcctatggtaaaaaggctgtgaactatgtatcactctcctcgaatgtagaacagaagtctgctatgtagtatatgaggaagacatgatatttgttcaaatggagtttatattctaaaagaaggggtcaacaaatttggatctatcacctgtttttgtacagctcttaagcttagtttttactttttttttttttttttttttttttgagacagggtctcactttgtcacccaggctagagtgcagtggtgcaaacacagcttactgcacttgacctcctgggcccaagtgatcctcctgcctcagccccacaaatagctgggactataggcacacaccaccatgtctggcccatttttgtattttttgtggagacagggttttgccatgctgctcaggctggtctcgaactcctgagctcaagtgatctgcctgcccaggcctcccaaatttctgggattacaggcgtgagccactgtgcctggctgtatatttttcagtggctaaacaagctcgaatggagaatgatattttgtgacataaaaattagatgaaatttactttaaagtgtccataagtcaacttttattggaacacagccatgcccattcatttatttgttgtctatgctgctttcacactatagtggtgaaggtgagtggttgcaacaaagaccttatggccacaaagtctaaaataattacctatttgaccgttgacagaaaaaaaattgctagtccccgttctagagggaactttagaactttctgtgattgtgggaatatgctgtatctgggctgtccaatatggtagtcactagctacagctggcacttgaaatgaggctagtacccctaaggaaaagacttttaagctttatttgattataattaatttagatttgaagagctccctgtggctagtggctactgtactgacagccctaggagatgagatgataattatgaagatgctgataaaaatgtgataatttaccatgtgccaagtgccgtgctaagagaacaaggatgatgctcttatgattctcattttacagatgaaaaaaaactgaagcttagatggatcaagtatgttgcccaaggttacacagccagagaggggcaagctagaacccagggaggttgactcctgagctgttgctctaaccattaggctatgctgcctcacgaaagacaagacacatagacattgaattgtaacatgtgagagaatataatgagtgctatgaaagaagcaacaacaaggcagagaaataattaaggggaaaaacttctgaccagggagggaaaagacaccttcttcatgggtgccaaactacttaagatgggctctaaaatttgggcaggattttgattgacacttacatgcttgtaagctagatggatgcaaccacctaaacacaggtgtgatgggggaagtaaagggggggttaagggattggaaagcagtccactttgaaaattcatgccacacctttgctagcaaagggccacaagttttcttggcagctggtgcacttcctcttttctctccgtaacgaccatgtaaatgaccttgccttcgttttcactttgactggaagtttagcttcaaacttgagcttaacttgagcaagagcaaggaaccacacagcttgaatatttgagtttcttctcctttcctccccaaaagctcaatttctgctctgatgagtgttttctctggtcttaatatttgtttttatccatattttaacatcatttcattacgtatttatttcttgcaatgcccctgggtcgttttgtgaatacgtgtgggtataaatgacagaataggttctggttgtgggaggatgtgaacccagggagataaattggaaaagataagttggtgtcaggcactgggtacagtcagggtcaaggaagctggtgggtgctcctgcctttgagaaatagcctgagccagttaggtgccatccccatgcccttatctcctgcagccttggctgcaatcctggcagctccccactcagttcttggaaacctggcaattggccctagttccatcccacgccactgcccgcttgcttcctgtgctggctctgatgtctgttgacatcttcttcgagtgttaactcccaaacatcctcagtttcagtcttgttattggcatcaggggacacactggcatcctacaatctctctaaagtacaggccaatcagatccctctcctctttaaaggtcttctgtagctctcaggtggaagtccaagttcagtagctttgcttagggtcctcgttcacaccccagctctgcctcttcctcactacatgacttgggcaagttgtgtaacttctgtatgccggagtttccttatctgtaaaataggaacaacaatagtacgtacctcaaaaggtgctgtgagggtagggtgtgggaatctatgtgaaacctcacaacggttccaggcacagaagatctctccatgtgttattgtcactgtcatgagctcttcagactcacctcttgccaatgcccttcacacagtttctggcttcacatccagtggaattacttgtagtttcctaaatgtcctccagcctgaatttgctcatctttgggtgttctgcacatttcctctgctggaaagtgttccttctccctcttaacctattcttcctcattcttcttatatcagagagcagggatgtcatggaagtagaagggaggaaaagagagagagagagagagagagagagagagagagagaggagggatataagtaagcaagacaaactcagcaacaagggatgagaaaatattcagaaattgggtgctgatttgcattccagaatccaaatctaggagcaggcagggctgggacagcaagccaggcttccgaccagatgggctatccatcagggttgcttactacagctcactaatgaccattattaagaccattgcatgtaaaatgtttatttcaaggtggaaaatgcacgttgggtttctcagaataggtgttggaatttctactacaattttcttcagtatacagaggagaattgcttgtgttggtcctctagagttaagattgccaccgtgctatagagtaatgagttgtaagtggtggccactgatcacagctctttgctgtgggctgccaccccagccagtggtgtaggtgaatcagcgttggtcaaagtatggccagccagcccaggctcgccatgcagttacgacttttgactaactgaccacagtcactctttcatggccttcccttcttggatgacatgaagaccatacattaactaacaggtcacttcctaatcatccaaacaggaacctagagatttttatacccaggacaggatatgggacatatatcagccagagttcttatttgcaaacaaagaaacataacctaggtgatctaagtagaatcagaatttattgattatatactggatgactcacagacttctgagaaggtttgagaacaaggcttgagggctgtaccaattggaaacagttctcaaaatcacactgatatggtttggctgtgtccccacccaaatctcatcttgaattgtagctcccataattcccacgtgtgtgggagggaccaggtgggagataattgaatcatgggggcggttcccccatactattcttgaggtagtgaataagtctcacgagatctgatggttttataaggggaaacccctttcactttgttctcattttctctcttgtctgcctccatgtaagacatgccttttgccttccgccatgattgtgaggcctcccagccacatggaactgtgagtccattaaacttctcttcctttgtaaatcacccagtctcgagtattttttttttttttttgagatggagttattttgctcttgttgcccaggctggagtgcaatggcgcgattttggctcactgcaacgtacaccacctgggttcaagtgattctcctgcctcagcctcctgagtagctgggattacaggtgcccaccaccacgcccggctaattttttttctatttttagtagagatggggttttaccatgttggttaggctggtcttgaactcctgacctcagcttatccaccctccttggcctcccaaagtgctgagattacaggcatgagccacggcgcccggcctcaggtataactttatcagcagcatgaaaatggacaaatatacacaccgtgaaagtgctcaggtaaggacactattgaggatttgttccctgagatgtgagtagaaaagcagttaatggaaacaacgcagttttcacattctgtatattttccctgtgccttttgatacaagttccaaaggaacatttaacagcatgacagcttcctgtttatttattctctcatctcttactggttggtcaatgcacataagtccatgtggagagagctcggagcatactcctccttgacggtggatcagaagtgtcatcttggtttccagtatcctgcctgagctgtgaattgccctgactcttcatttctcactctgactctctgcagcatctgtctgcttctcagaacacttgcttcccttggcttctgtgacctccttcctctccaggtttgccacctgctttctaaatgttccttctgggctcccttcctccctttaacctctcactgttagccttactcatggttctatattcagctgcctttcttcttcccacttctctctcaatagcctgtcccaggaggtgctgcattcactcctatggcgttataatcaataagctgatgatttcaaaaccctcagcattctctctctctctttttgagacacggtcttgctatattgcccaggctggagtgcagtggtataatcatggctcactgcagccttgaactcctgggctcaagccatcctcccacctcagcttcctgtgtagctaggactacacatgtgcataaccatgcctggctaatttttaaatttttttgtagagagggacatctcactatcttgcctaggctggtctcaaactcctggcctcaagtgatcctccctcctcagcttcctaaagtgctgggattacaggcatgagccaccatgcccagaactcagctctcttaaacttccgaccagcaaggaagcaactagacggctctttgtggatgtccagcagcccttcaaactgaacacattccaaaatggaacccttgctgcttcttcctgtgttctctgattcagtgaatagcagcagaatcactgagttagaaatctaggtatcatctttgagtccttcctgtctcctccttatccttcacatcaatccctaggttctctcgctcttattttcttaatatctctcaaatctgcccagcttcattcacctgcatcaaaatcttttagttttagctatcatcatcccttacttggatcattgcaacagactcctgagaagtgttcaggctccagactccagagagcccttgcagtccctactcatgtccttgcttcattagaacccaaaagataaagtgtgcacttggtcacatctcttccctgcatgaggccattcagtaaatccccacagctataagacaatttaaacttctaaggcaggggttggtaagctatggctcatgggttgaatcacctgttttcatgcagcataaatgctaagaaattttttacattttaaaattattgaaaaaaaaagtcaaagaatgtgacacatgaaaattatatggaccttatccaaaatatacaaagaactcttaagctcaacaagagaacaaacaactcaattaaaaaatggctaaaatggggccaggcacagtggctcacgcctgtaatcccagcacttttggaggctgaggcaagtggatcacctgtggtcaggagttcaagaccagactgaccaacatggtgaaacccccgtctctactaaaaatacaaaaattagccaaggttggtggtgggcgtctgtaatcccagctatttaggaggctgaggcaggagaatcgcttgaacctgggaggtggaggttgcagtgagctgagattgcaccattgaactccagcctgggcaacaagagcgaaacttcatctcaggaaaaaaaaaaaaaaaaaaaaaaaagatattttgaatctggttctgagctaaagttgagtaaattcttagctaagaaaaaattggaaatccatcatctatattagcaacagattctcagagtaaattgttaacttctatgatttctgataatcgagctggacttgatcatacaagttagtctaataatgtattcaaccaaaatatagactttattggtctgattcagaagcattcatgctcacaagctttgggaaagtgaaaaataataaaatcattttggattaaaaaagaaatggccaaagacctaaacagacaccacctcagagaagactcacagatggcaaataagcacaaaaaaagatgcttaccagcatatgccattagggaactataaattaaaacaaggaggaaccactacacatttaacaggatgcctaaaatccaaagcactgacaaatgctggcaaggatgtagagcaacaggagctctcattcattgctggtgggaatgcaagatggtacagggtacacctactttagaatccagtttggcaatttttttttacaaagcaaaaggtacttttgccatgtgatccagaaattgaacttcttgctatttactcagagaagttgcacatggatgtttatagcagctttattcataattgccaacacttggaagcaaacgagatgtcctttagtaaatatggataaattgtggtacatctatacagtggaatattattcagtaataaaaagaaatgagctatccagtcacaaaaagacaaggaggaatcttaattgcatgttactaagtgaagcagtcagtctaaaaaggctacatagtgtatgcttccaactatgtggcattctgcaaaaagcaaacatatggagacagaatatacagaatatataaggagcttgaacaactatataggaaaaaatctaataatccaatttaaatatgggcaaaagatctgaatagacatttctcaaaagaagacatgcaaatggcaaacaggcatatgacaagatgttcaacatcactgatcatcagagaaacgcagatcaaaactacaatgaggtatcatagcaccccagttaaaatggcttttatccaaaagacaggccataacaaatgctggcaaggatgtgcagaaaagggaaactttgtactctgttggtgggaatgtcaattagtacaaccactaggaagaacagtttggaggttcctcagaaagctaataataaagctaccatattatccagcaatcccactgctaggtacataccccaaagaaaggaaatcagtatatcaaagagatatctgcactcccatatttactgtagcattattcacaatagccatgatttggaagcaacccaaatgtctgtcaatagatgagtggatacagaaatgtggtacaaggctgggcatggtgactcacacctgtaatcccagcactttgggaggccaaggcaggaagatcatttgaggtcaggagtttgagaccagcctgaccaacatgatgaaaccccatctctactaaaaaaaaaaaaaatttagccaggcatggtggtgcacacctgtaatctcagctacttgggaggctgaggcatgagaatcacttgaacccaggaggcggaggttgcagtgacctgagatcgtgccactgcactccagcctggcgacagagtgaggttctgtctcaaaaaaagacatgtggtacaaatacataatggagtactattcagccataaaaaagaatgagatgtatttgcaacaacatggaaacaactggagttcattttgttaagtgaagtaggccaagcacagaaaaacttcacatattctcacttatttgtgggagctaaaaattagaacaactggactgatggagatagagagcagaaggatggttaccagtggctgggaagtgtagcggtggagggtggaggggatgtaaggatggttaatgggtaaaaactagttagaaaggatgaataagacatagtatttgatagcacaatagtaaaaaataatttaattgtacatttaaaaataattaaaagagtataattgtaaaggataaatgctttgaggtgatggataccccagttaccctgatgtgattattacccattgtatgcctgtatcaaaatatcccatataccccataaatacatacaccttctatgtacccacacaaataaaaaatagagagaaaaacatagggagaaagtatagaaattcagtggttggacaggcgtggtggctcacatctgtaatcccagtaatttgggaggccaaggcaggccttcttgagcccagaagttcaagactagcctgggcaatgtggcaaaaccctgtttctaccccccaaaatacaaaaactagctgagcatggtggtgtgcacctgtagtcccagctacttgggaggctgaggtgggaggatggcttgagcccggaggttgcagtgagctaagatcatgccactgcactccagcttaggtggcagagccagactctgtctcaaaaaatatatatgtagataataaaataaaacgaaaatcagtggttatcagggccttaggggaaggagagagggataaacagtggaccacaggggatatttgtggcagtgaatctcttccacaggatgctgtaatggtagatgtaaatgtaattacacatttatcaaaactcatagaatatacaacagaaagagtgaactctaatgtaaactatggacttcagttaataataatgtatcaggccaggtgaggtggctcaggcttgtaatcctagcactttgggaggcccaagtggatggactgcttgagctcaggagtttgagaccagcctgggcaacatagtgagaccctgactctacaaaaaatacaaaaattagctgggcgtggtggtgtatgccggtagtctcagctactcaggaagctgggataggagactggcttgagcccaggagatgggaggttgcagtgagctgagattgagattgtgccactgcactccagcctgggtaacagagccagatcctgtttcacacacacagaagtatcaacattggctcttcaagtataacaaatgtaccacacgaatgcaagatgtcaatataagggaaaaccatgtatggagggttgatgaggtggtatctgggaactctctgtattttctgccaatttttttgtaaacctagaattgctaaaaccaaaagtctattaattaggataattacatcaatttcaaattcagtgttcataaatttttatcagaagacatccacgcccattcatttacatattgcctatggccacttttgtgatacaataaccaaactgagaagttgccacagtgcccagatggcttacaacatctaaagcatttactatctgcccctcccccctaccacaggccactgatcactcttccagcctcacaccatcttccatcttatccttaggccatcttgaaaaatattttccttagaaatccatgctctcttgcccattagttcctctacctgaaataccaggcaggactaactgggtaccattatatcccagacacctttttttggctggctttttctgatcactgatgcctgagttagatgccctttcaatgtacccccccaatcccacccccataatttggccattttattgaaagaactcatgttattgctggccccttcagactgtgaaattttttttttcttttttttgagacagagtgtcgctctatcacccaggctggagtgtagtggcccgatttcggctcactgcaacctccgcctccctggttcaagcaattcttctgcctcagccttctgagtagctgggactacaggcgtgcaccaccacacccggctaatttttgtatttttagtagagacggggtttcaccatattggccaggctggtctcaaactcctgacctcgtgatctgcccacctcagcctcccaaagtgctgagattacaggtgtgagccaccgcacctggcccagactgtgaacttttaagtttgaggtcatggcttatttatctctgcatgcctgttacctagtacctgctagtatccactagtgtggatgatcaggaatcattttataagggattctaaacttggagtccatacatggatgggcttcaggatctgtgaccaccttgaaatgggatgaaaaaggctgtgtgtgtatgtttgtttgggcttatttcctggggagaaagcccattgttttcatgagcttctcaaagggaaccatgaccagcctccagcaaagaaaaaaatgaagaattcctggaagagtataggtacatgatcagtacagtgccaacctggatacattaacaagatttgttgactttgtcagattgacaaaaacaaagaaagttactgatcctagtcaacgatcataccatccatgacacaaagatctgtgtgacaatagcaaagacatagaatcaacccaaatgcccatcaatgatagactggataaagaaaatgtggtacatatacactgtggaatgctatgcagccataaaaaggaatgagatcgtgtcctttgcagggatgtggatggagctggaagctattatcttcagcaaactaacacaggaacagaaaaccaaacaccttatgttctcacttacaagtgggagctgaacaatgagaacacatggacacagggagcagaacaacacacactggggcctgttggggaggcagggagggggagaatcagctaatgcgtgtgggtcttaatacctaggtgatgagctgataggtgcagcaaaccaccatggcacacgtttatctatgtacaaacctgcacgttcttctgcacatgtatcccgaacttaaattaaattaaaaaacaaacaaacatacatacatctgaaaaacaggaaaccactatcttttcacattaaaaaaaaaagatctgtgtgggtgactgactcatccctattttttaaagcctcaaatccatgacaaaaggtcagccttgtttaaaaacagcttaggcctaggagattagtattcaaaggaagaacattttagaagagattcatacaaatatctggacttcactgaatacatgcttgtgataattaattttgtgtcaacttgggtaggccatgctacccagttattggtcaaacacaagtctagatgttgctgtgaatgtattttttttttgtacatgcgattatcatttaagtcaatagacattgagtaaagcagattactctctttaatgtttgtgggcctcactcagttgaaggccttaagagaaaagactgaggttccctgaggaagaaggagttctgccttggacttgagactgcagcatcaactcttccttgggtctaggctgctgacctgccctgcagattttggactgtatatacccaaagaaatacaaatcattgtatcataaagacacatgcatgcttatgttcattgtagcactattcacaatagcaaagacatggaatcaacctaaatgcccatcagtggtagtctggataaagaaaatgtggtacatatacaccatggaatactattcagtgataaaaagaatcaaatcatgtctttcgcagcaacatagatacagctggaggccattctcctacgcatattaacacaggaatagaaaactaccgcatgttctcacttataagtgggagctaaacattgattactcaaggacataaagatggcagcaatagatacctggaactactagaagggggagtcggggagcaaggatttaaaaactattgggtactatgctcactacctgggtgatgggatcacttgtacccaaatccttagcatcacacaatatacccaggtaacaaacctgcacctgtacccctgaatctaaaataaaagttgaatgaataagtaaatatgctatttttgatgaagatatgttttagattaagatatttttacttggaacgctttagtgttagatccaagtttgccacccttctggtttcttggttaatattttcaattaatgctcaagataaacacccctccttagtttaaatgagcatttgccagtgagaaaagtaggaagacattttggcattcgggtgtttgctggaattagttatgtctgaaaccacaactttgggtctcctaggaagtataagtactcagtaccattgtacaccataagtaggtggtgatggactttgaaattggaaatacgtggatctgtgtttagccaatggaaactttaggtgcaagaaccaccaagaaatggaccaccaaagtattccttcctttcacgttttagctttcttaattctatttctgcttatcactcatgtttattttgcttttatggtttttggtattgtttcacaagcattgtaacagcaattatgcaatttctttttcgttttttgagtgggaaggtcttgctgtgtggccagggctgcagtgcagtggtgcgatcatggctcactgcagccttgacctcctgggctaaagcaatcctcccagtacatgcgtgggtcaccacatctggctaatttttaaaatttttttgtagagacggcggtctcactgtgttgcccaggctggtcttgaactcctgggcccaaggaagcctccagcctgggcctcctagagtgatgggattacagatgttagccaccagttaaacaggaaaatttacttataatcccactactctagaaacatatttttaaactgagtttctcaaggacacagtccaaaggaaaggctaacagacctttgaatcaagggcagaaggcctctggagaagggaaaccatacagaaactacagtggaacaaatgtcatttctgaaacataatttacgaataccaacaagttggtattctcacagtggcacagtggcactgaaagaacatttgcaccatttggaaagcactgaggctatttagtttttcagaacagctgtctcactgaactttccccgggctcaactgtctactgcccatttccctttatgtctcctaaagccccagcatatgaggatttggcacctagaacaaggttgagtgtgactgacacaggaaatggcccgtggctggactggcgcctgcatgcagctgaatggggacacacagccaggactcagcaaggaagcagctgtcactcaaagtgctcagctcaatgtcagcagcttgcttgtttccttattcttagtgtcttaactgcacttggaaggtaacactaatggtgggacatagtgtcactctgacttaaccttgtagtttgggtagctctgcaggaagagggagaaatgggaagtaaattaacattcatttaatatatcccccactgtactgaacaccatatatatatatgtagacagagagagagagagagagagagagagagagagagagatctatctattctgcaatggagagtgattaagatcactgcctgggtttaagccatgttagctgtgtggccatgggcaagtcacttaacttctccatgtctcatgtttttttctgtaacaataacaatattacctatgttaagagttactatgaggattaaattaattatgtgtaaagcccttagatcagtgcttggaacacagtaagtgctatacgtgtgtttgctgttatacccttagtagttaacttcaacaaagtcctgttcatccttttatgaccgaggaaacggacacccatggagattaagtcaattaccggacatggcagagcctgaaaccaaactcagatttacctgactgcaatattttcttcccataacatgaccgggcctgctcaatgctatcaaattccctctgctgcttgccagcgtagggttcagtttatcaacccttctttgtactgtcaagagtgaaatcctatctgactgaggctcttttatccccatttctgatcaaccctggagaagggccaatggtcaacatttggggagtcagtgaaaggagaaacttcccttttccattcccccctgtaagcctgattgcccttttgatatcgcctatgtatccctatcagaaggcagtgaataacataactaaataaatcatctgatggacagtacccttagagcctggtggatttgggggagcagtcggcctccgagggcagcgctgcccaataggaatataatgggagccatctgtgtaactttaaactttttaatagctacactaagaattaaaaaacaaaagtgaaattaactttaatattttacctaatatatcaaaaatattatcatttcaatctggaatcaatataaacactattgagctacttttttgtattgtgttgagttcatgatttactttaaacatacagcccttgaagtatatacaatgttactacaacagctcctggacacttgcatatgtgtgtattttgcttttttgtattgtgttgaatccattatgaattttaagcacacggccctagaaatatatacaatgctactaaagcagcccctagccagacacttggacatgtttccttgatgggccttctttattgagttacagacttgatgtgtctaaaattgtaccgtctcccttttcttcctccttagacagatactctgatggaaaaaaaaaatggctgaaagagtaaagtcgcttttcctccgaattttccccattagtgcagcttgtctggacagctgcgatttcttgttgggtcacagggcatttttgacaatctgcacgctctgcacttctccctctgtgaggtcaggagtgatgggggggcacttcaggttctagaaggactcaggcctcctcttggaccctgacaaagtcctttcccgtgcctggtttccacagggacggtgttgcctgcacagacgacagcacccccggcgggggagagcggccccagcggagactcggcagggctcaggtttcctggaccggatgactgacctgagcccggggcccgggcggcgctggccgggcacaggatgcgcggcccggagagcgcatcccggccatccgcccgcgctcggccccgcagcgcagctgctgcagatccgcgggggccgccacctcctccgggggctggcagcgacaggactctccccgccccggcccggggccctcccttgcaggggctgcggggaggagtcgcccacctgtcatctgagacgccccacgtgggtcggccagggagggggtggaaaggagggagaaaaggcagaggcgtcaagggaggccggagggagagtggggtggacagaggagcggagggacgagagggaagcgcacgatagctgcgcggagagagagcgaagagcaggcggaggaacaaaggcgacccaagacacccagagagggacaggtaaggaggggcaggtgagcaggaaggaggagagaaccgggctagggagactgcggaaaggagaagtggcgggcgtgaggaaactgctgtggataagggacgagtaagatggaaagaatggcggaagacgaacgaccgcagagtgagggtccttccaagagcgaccaggggggaggaactggggctgttgcgcccttaaggttgctaaggcgacggttctggccagagcgaggcgcattgacgtcagtagccgaacgctgattggctgcggccaggccgtttccggtggagctgtcgcctagccgctatcgcagagtggagcggggctgggagcaaagcgctgagggagctcggtacgccgccgcctcgcacccgcagcctcgcgcccgccgccgcccgtccccaggtgagtggggtcggccgggggctcaggcgaggtgagcttcgtcgcttcgcagccggtttgcgggagctggaccgatccaagatggcgtcacggggagcgacctgcagggggacggccgcaccccctgcccctccccggcccggcgggcgcctccccgcaggcctcacgcccccggctccgagtctgcatcctcaaggccgtctgggcgttggctttggtgcggggctccccagccgccccgctcgcgctcgctgcccccaccccacggctcctggggccctgggccctccgcggccctccccggccgccttcgcccccgcgcgccgcggcctcttcgctcaccctcccccatttcctgaaggacaacggctctattttactggggtccgccatcgtctcgtccgccggtcctggctcttcttgtaagccggtagttttcctctccacttttgacgactcgtcattgctagcagtagcctttcctcttcatagcggagtgatctttcccccaacacgacggtcttagtcgggctcctgaatttcctcttgtcccctttcacctctctccctttcccaattttgcccccctgaggcctcctcgccaccactgtggccttccgactggcgtagcttgaagtctcggcttcccttcattttgtggtcatgaccgtggcctacgtgaagtgaagggcattttcctgcccttcttctagaaaatacacggtacctattaacctcttcagctcagagcctgtggtgacgaccgtcctactccttgagagattcccaagagatccgtctttttagcagagcgaggaaagcaaacacttactcaagatgaccctaggggagccgtaacttggctggtctaagggggtgcggtctgaatcaggaacagtttctcaaagtgtttttatttatttcccagaatgtaatcctttcgaaacaattttgtcacaactgaattttcaaaagaatgaatctgagtgttttgttttacatagagacaatgcagcgaaagttttaaagcagttaaataattgtgtgtggggagggaaggctaggttgttgggctttacaaataagtacacatagagaatccgggtaactcgattaaaaatattaagactgtgaagtctggttattcagggatttacatggtgactgcattaattttggtacatttctgttcgtatactgtcctattaccggtggctatctttttggttttcgtaatacattagttgtttcaaacaaaaacacagtttcactccttaggcccagttctctcatctctaccagccaaagacctgatcttagaatgattgatcatttgaatgttcttaaaatatgacaatgctttgaagcatgaaagatctgatttatgattgttcttggtggcctttaagtattatttgaaatgcagacaattctactgaagtggatcttcagttcatatgattgcctgacctggagaagtggcttgtataaatctatcctaaagtaaatgcgcgtttttgtttttgttttgcctgtttaaagtagcagcatgattatttttccatggcttctaatttatgtgcttgtcttggagccacgaactttctaatggtctgttaattagtctacttgttgttgacctttatggtgaaagttgtcaaaacaaaatgagtaacagtgtagcactttagaatagctctttactctgttaattctttctataagttcttttaaatttacagtttcatctcaatagtttacaatgcattataattggaaaagtctgattagtattgaattcagttgctgagtggaggggaccacactcttgtcttctactcttaagtgcttagtaattaggagttggaaggaaaacagtatatgaccctgttgttaaattagtaaacttttaattctagggtaaggttagctgctcatcattatctctgtttgctttactttacataaaggtaccataattcgaatcctctaaaatccattaaatgcaatttatccattaaatgtaatccattaaatgcaatttatctattgaatcttcatgcaagtttgaaacttaagtgttttaacattctcctgtcaagatgaagaaaatattttgacaattttctgtccaaatgttttacagtttatgtggtaagaattctcccctcccccaactaaggattttccttcttttaccactagtgtattatcatttaggggtggaatctggcaaacgagtctggaataaaggttgcttttaaaactcatctaattttcttgtgtgtttttaaaaattttgattatgctagtagttggctaatcagatcctcactccagtggtttgctctgtgacgttaggatactcccatgggatagaagttacgtatagggaatgtcagatattcttcattgtgctgacttgctttcgcttacagttgacttttgtgccctggtaattctgtatcctgtttaccgtttacctacttcccacgtcatcatgatttcttttgagggagaactgaatgaaattcccttaagggcctgacttcagcacccgtctctgcagaggttagtggctcatacttcctcccaggagctgaggttatcgactctcactgttgcctacagagcacagatcctgaactaaatgaaacatttacttggaataatgctaattctgtacatattttattccctagtccccacttccctgtttaaaaacaaaatctacttagaaaaaaatccctgtgaatcagttgtctaatgaatttagcaagttaaatgccagattgacattttgctttatagtttatacaagcatgtgtgtgtttttttctcgcagagaaccatggagtctggcagtaccgccgccagtgaggaggcacgcagccttcgagaatgtgagctctacgtccagaagcataacattcaagcgctgctcaaagattctattgtgcagttgtgcactgctcgacctgagagacccatggcattcctcagggaatactttgagaggttggagaaggtaaaaataaatgtggggagatgatgaggtgattgtgacagttgttacatttaataactggaatgttactaatttgtattttttggaagaaaaggaatctgactaaataaaaagtctaaaacaatttcaaataagaaatacagttaaggcatttgtagtaatttaaaaattcttaattagtagaatttatcagaaaaatgaacctgtatgctaactgtacttggctaataaagggtttccaaacaattctttgtaactttttaaattagtgcgtagaactataacagataaaactgatcagaactagtatagcagttctatgaataagaaattctatagttcttaaaggcagttaatgctcctcccgttttgaacaaagcaagtaagcgtagtaaatcttatcccacttttaaaactagtgtaatgaaacatgaatctagcttgtgactgatatatcagaaattttcaattagattcggtctattttagtatagagtatatctgataaattactgtagagatattgatattgatgttcctcaaaaattttactccattttattggtcaggacttgttgcgccttgaaaaaaattaatccaatttttattcttttttgctcttcctccttgcttgtatgtcattgtgacctacgtatatggcatatgtttttctaagcaaagtgataattttacatcagggataattgaagcaaatgaatgcttcaattcatctccctcaagaaacgatgaatgaaaaagtctgggttaccaaatattttgaatagtttatgtgattcgcttctgtaaatcagtgagagaaacttactgattttcttgtgcatgtggaagttatgaggtggttcataatgattatgaattaattgaaatgaatcatataccaaaagaaatgattcatataccaaaagaaatgaatcatttcttttggtatatgattatctaattgtataatagaaataatttgctttattttccattggtttttatagtttcttataatcagtatagtttattagtaaaagaatctgtactaagctttaaaaagtatttgggtagctcattgatcaggtattttctattttctttaaaaactgattgttaaaatttgtatttagtaccatgatcagaataattaaaaaaaaaacaaaaacaactagtcactgtgaatgttgctttgctgtcttggaattatagtagatattctggctttctcttatttatgcaatttccaaatcatggaagtattgtagagccaggtcatagatgtagcttgttttgaagtcaagtgcattcctggagatccggttttgaaatgggtcactgtaaggtgatccctcttctttggacatcaatagaaaccatcaaatgagaggattaagttggtgagacattaagtgtgtatctttttatagggagtgttgaatgtgtgatgctagtttcaaagcttgtagttgccacagtactgtttaaagactaacaaaggtggaaagcaataaataattattaaaatggtttctttgcagatggaatttttagatttaatgtgtttcagcttctttaacttttaataattaaagtcacagttcaacatggtttttgctgtaattcaagggtctttgttcacatgtatacattccttccagggttgaatatagatacctggacctttaagtaattagattttcaacttgttagtgggtcatagttctgtgtattaggtgttaatttgtatgttagtctattagtccgttgtcatgctgctaataaagacataccgaggctgggtaattcataaaggaaagaggtttaattgactcacaattcagcatggctggggaggcctcaggaaacttacaatcatggcagaaggagaagcaaacccatcctcttcacatggcagcagcaaggagaagtacagagcaaaatgggaaaagtcccttatgaaaccgtcagctatcgtgaggactcactcactatcatgataacagcatgagggtaacccccctgccatgattaagttacctcccaccaggtccctctcagggcacatagggattatgggaactgcaattcaagatgagatttgggtgtggacacagccaaaccatatcattccacctctggcccctcccagatctcatgttttcacattttgaaacacagtcatgcctttccaacagtccctcagagtcttaactcattccagcattaactcaaaagttcaagtccaaagtctcatctgaggcaaggcaagtcccttccacctatgagcctgtaaaatcagaagcaagttagttacttcctggggtcattgggtagataacacccattccaaatgggagaacttggtcaaaacaaggggagtatagaccccgtgcaaatccgaaatccaacgaggcagtaattaaatcttaaagttgcaaaaggatctcctttgactccatgtctcacattcagggcacactgatgcaagaggtgggctcccgtggccttgggcagctccgcccctgtggctttgcagggtacagcccccctcctggctgcttccatgggcaggcattgagagtctgttgcttttccaggtgcatggtgcaatctgttggtggatctaccattctggagtctggaggatagtggccctcttctcgtagttccattaggcagtgctgcagtggggactcggtgtgggggctccaaacgaccccacatttcccttccgcactgccctagcagaggttctccaggagggccacgcccctgcagcaaacttctgtctgggcatccaggcatttctgtacatcttctgaaatctagggggaggttcccaaacctcagttcttgacttctgtgcacccacaggcccagcaccacttgtaagccaccagggcttggggcttgcactctctgaagtaatggccagagctgtaccttttagccaagactggagctgaagcagctggaacgcagggtaccatgtcctgaggctgcatagtacaggagccccagggcatggcctaggaaaccattttcccctcctaggcctctgggcctatgatgggaggggctgtcctgaaggtctgtgacatgccctggagacattttccccattgtcttggtgattaacatttggctccttgttacttatgtgaatttctgcggcaggcttgaatttctccccagaaaatgggattttcttttctattgctttgtcaggctgcaaatttttcaagctctgcttcctcttgaatgctttcctgcttagaaatttcttccaccggataccctaaatcatttctctcaagttcaaagttccacagatttctagggcagggccaaaatactgccagtctctttgcatagcgagagtcacctttactccagttctcaagttcctcatctccatctgagaccaccttagcctggacttcattgtccatattactatcagcattttggtcaaagccgtacaagaaatctctaggaagttccaaactttcccacattttcctgtcttcttctgagccctccagactgttccaccctcttcctgttacccagttccaaagttgcttctgcatttttgggtatccttgtaacagcaccccacgctctgtgtaccattttactgtattagtctgttctcatgctgctaataaaagacatacccaagactgggtaatttataaaggaaagtggtttgactcacagttcctcatggctgggcaggcctcgggaagctacaatcatggcagaaggggaagcaaacacattcttcttcacatggcagcagcaaggagaagggtcaagcaaaagggggaaaagcccctcaaaactgtcagatgtcatgagagctcactatcaccagaacagcatggaggtaaccacccctgtgattaaattacctcccaccaggtccctcccacaatatgtggggattatgggaactataattcaagatgagatttgggtggggacacagccaaaccatatcagtctgaaaatacagtcatattctcatcaccttcttcgtcattactggggggttgtgtttctgttaccttcaactactccataagaaatgtaccaaaaactcttgacagttggtcttttgaaagcttctgcattttaattcagtcatctggaatttgagtcttcttttactcttgtatttattagacccttaggtaagaggaattaaaataacagtgaccttgtgtctgctgtgtcaggtactgtgtgaagcactttatatacataaatactcgttatttcaaatgtacgaggtatgtgattttcagcattttatagacatagcagtaaaactgagagaaattaagtaatgtggctgtggttatagactgtagtcgtcagcttttgctggagcaacatacaacccccaaatttcagtggttactacaacagaccagtcatgtgcagttcttctggtatcagcctgtcttatgttcttgacaccacatatcttgttctggggctgagcagaaggagcagccctatatagggcatgctgttctcaaagcagagggagggcagaagctcaaggtggacagagccaaaccacacaggcaaccatggtatggcatgtccacttacattccatggccagagcaagtcctgtagccaagccttaagtcagtggggtgggaagtatactttacccacagggaagagtgacagaagcagggagggaacaaataatcgggaaaacatagtagtggggacagaatttgaacctaagagtcaagaagatagtgcagaatttaatgcaaaaccgaatgcagaatttgaacctcagagtcaagaacataattaaccactgagtagactgggaggttttttctaatttttaattttttattgatatataacatttgtatgtttttatggagtacatgtgatattttacaggcatagaatgtgtaatgatcacgtcaaggtatttaggttattcatcacctcacttaaagagctgaggaggaaggagactgacagaaggatgacaacagcaagagaaaggatataaaaatatatcatagtatatactagaaaactcatgatctgagtaatggctctgagttgtcagattaggttatattcagattgctgtttttaaaagactcactagaatccatgagacactgctaaaatcagaatgcttttgttacttcaaaattaatcttaaaaattcagtgaagtagaatgtagtcccaagtgaaatgttatttgtgaaatttttcctgaaatttttgtgaaatgtcagtgacaaatttgggggtgggagaatttgtgttttcatttatactcttaaactgtgtgtgtgttttattttatttttattattatttttttgagacagtcttgctctgtcacccaggctggactgcagtggtgcaatctcggctcactgcaacctctgcctcctgggttcaggcgattctcctgcctctgcctcctgagtagctggggctacaggtgcctgccaccacacctggctaatttttgtatttttagtagagatggggtttcaccataatggccagtctggtcttgaactcctgaccttgtggtctgcccaccttggcctcccgaagtgttgggattacaggtgtgagccaccatgcctggcctattttttgagacaggatctcactctgttgcccaggcctgagtgcagtggtgcgatcatggctcactgcagtctctaccttccaggctcaggtgatcctcctgcctcagcttcccaagtagctgggactacaggtgtgtgccaccacgcccaactaatttttatgtgtttttgtagagatgaggttttacaatgttgcctaggcgggtctcgaactcctggactcaagtgatctgccaccttcggcctcccaaagggttgtgattataggcgtaagccactgtacccagtcatgtattcttaaactttaaacttgggagagacttgagttttatacctgtgttaatatgaaatgagaaaaccttactggttattggaacaaccagaattaacatgaaatgagttttctaaaaaccatattttaaaaagtaggttacatattcacatatttcaaagttgtgcaggtacaaaggggcataataatgaaaggtctccctcccacgccattgcttttcttgaatgctgccaatgttctggagattaatatatgggcacttacaaatttatatatagaaaagaaataacgggtcaaatgaatgagaaagtagaagataacacatttttattttttcccttttacttcaggcacaacaactaattctttagatctgagaggaatttgtttttaaggctctagatgtgaaaaaaggaatgtttaatagtttatcttaggttttatttgaattggtccaataagtagtttttaaaagcaagtaaactctttttgtcttttaacttcaagtttaaaccttgattacaaagagtgatcctagctctgctgggagaagtattatagatacgatctcgtttaaattcgtggttaccatcacatcatttcattatttgtttttatctgggatcaaactggaatgtgaattccacaggctcaggaccctctcctatttgtttttaatttcctgttgcctagcataggtcttggcctggcagatccagaaaatggcttattgagttaatgaaataactcagtaatctagacattcttggatcactatgttgggcttgaattgtttttcctgataacatttcttttggcaggagggtctcttgctatctgcagtagcatccaaaaaaacccaattttcaggattttgtcttgcagtgtgttactgttgtgtgcatcacagataattgttgtcaagacattaatgaatatctgatttgttactcacatgttatgtgagtactaatggcttgtactaatgacttttgcccattaataaaggatagcatctgttatcatctgaggtacattctgttgagagtgtttcaagtgttactctctttttttcccctttggaattggtgttttcctcttaacttacattgttaatggaagaagagattggaagtgactgagatagactatcattggaacatgagagtgccagctttacatgccgaaggatctcattttgcaaactcgtaatttctttcaggaggaggcaaaacagattcagaatctgcagaaagcaggcactcgtacagactcaagggaggatgagatttctcctcctccacccaacccagtggttaaaggtaggaggcgacgaggtgctatcagcgctgaggtctacacggaggaagatgcggcatcctatgttagaaaggtagttttgatatttgaatatcggggggatgcttttgggacccacttggtggtcatctagtctcctttgatgaatgaatcataaaatacaaaacagggtggaacttcatccatcctgtacaattcttgggtactggaaaacaggtttctgtaatagcatgctgtcagaggaaataactaatagtgattatgaactagtgaataattgcattttggggtttgttatttccttgcagttgttttgcagtagaaggaggtgggcggtattgctttttctcttgaatcgtgatgtcctttttttgctatcctattaaatgttgtggcttttaaccttttattctacgagcctcatttgtcctgtgttctcctcttcctcagagccaggctattttgagttatgctgttagccttaaaggggaacagaattgtcctggcacttgaggcttgtgaagctaacagatcacagatttttaaaatgactaattattataaaatacttagttttgcctcagaataatgaccttggtccaggtgttttgatttgtttctttagttgttaactgggaaccaagtaccagactttatatttaggcctggctgtaggcaaggggattaattagtcaatacttgttgagtagtttatggatcaaagatagtacaagtgtgttgtagtgaaacactacaaagcagtcttgtttaaataccataatgtggcttgacatttaattgaagcgcaggttgcaaacgtgaaatgtttttggtttatggaattgtcatttgaccttcagttcttttctaggttataccaaaagattacaagacaatggccgctttagccaaagccattgaaaagaatgtgctgttttcacatcttgatgataatgagagaaggtaggaacaggctctttcttaacactatttttcaagtaagggtgtgatcccaaattgttttcaacacttgttgcaagttttagagctcttagtaattgttcaccagatgacagtctggggtctttaattctaagcttaatgtttgaaattcacggaagagacatgtgaaatgtaacacgaggccttctctcttttgcagtgatatttttgatgccatgttttcggtctcctttatcgcaggagagactgtgattcagcaaggtaagggcctctggagcatgcaatattgttacgggagaggaggcgagactagaggatttttttggttttgttttattgaagtttgttttcctctttgatcctaccacttttttttttctgttatactattggatttttctatttcttttaaattaagattttctgagatggacagaacactttgtattgggaactaatatttttgatacagttttgtttataatttaaaggaaatgcctacattgtcttaccttgaatgtcatatagaattgcagaatcatatatatctctcatgttctttatattgttaatcacttttaaagtaagaaataaatgaaacacctacattcttcattgtatagccctgtctattaaaaaggttctaggacttctatagattcttactttgcctatatagactaacatggatctaactttttgactatcttcctctttttattttcttatttattcttgacattttatgagtgggtatatattttcattttgtggcagcctgataatttgttattaactatttgagttgtttctaatgtccttgttataaatgccatagcagttaataactacacatatgtagcttttaaaaatttttttcagaggtattcttcaccatgagatgactaaaaaaattttgattaattctatgacttttaaaatatgttgcttgattttctttcccctgaaagattgtgttagtttgtaacacactctcacagtaccactgtaaaataagtttattgttttgtaataattttgataatttctttctttaatttggaatatgcttctaacttttttaccctcttttaggtgatgaaggggataacttctatgtgattgatcaaggagagacggatgtaagatttaccaatatcaaaaatatgttgatcttaaaagccaatgtattgatcgcttccgagcaataagaatagtgattttgaagggtcattacatcccttgtatgtcagattttattaataccttttgccaagtatttttatgacacagagaaactctttaaaggtaattttctgttcagaactttgctggagtggtggtgaagaagtgtgtgtagctgggtgcagtggccgatgcctataatcccagcactttgggagatggaggcaagagggttgcttgagcccaggagttcaagaccagcctgggcaacaaagtgaaacctcatctcttaaaaaaaaaaaaaaaaaaagattctagacccagccattagctagcaaaattaatatacctttcttattcacaaatgaaatggggacaataatagcattgatcttttaggattattagaagattcagtgacctaatgcaagtaaaatgtttagcatagtgctcagcacggttctctaagtatctgtgactggtattagtgcttagctgacctttttcccttacatccttacagagtgcttttttcttatcagataattaaatcaggtaaattatagacactcttaactcatttaactcgtcagaaatcacctattcttctctgttgtgtactgcaaacataatatattctgttttttaaaacaaagttcaggattgtgaccttttaaaaaggtttgagggtttttaacatttaagtgtttgtatctagaaaataaacttttttgatgtcacttgcactttaggtctatgttaacaatgaatgggcaaccagtgttggggaaggagggagctttggagaacttgctttgatttatggaacaccgagagcagccactgtcaaagcaaagacaaatgtgaaattgtggggcatcgaccgagacagctatagaagaatcctcatggtaagagaccatggtgtttgagagtgtgatttagaattctcatctacgtaactaatgtttgaatattaccaaattaaaaagagaatatttcttttaatgagcaaatatttctttcttttaataagcgaatatttttcttttaatgagcaaatactttgcattaagcccagcttagcattattcattatgccattttaggcagtgatattttagaacaaaaccttgggaaacaagatctggtatatatgtgctggtcatctcatgtttggaaatctatccatttgctggtaggcacatcttaatttacctagttatacccattacagcatgataggtgctgcttttaagtgcttaaagttatttggggccattcagaaataatcagcttccctaacctgtgaaagtgggttatcagtaatgtatatgtatgtcatgtcccctctcgttaaaggaataaacaaaatactaaaaccattggaactttctggtgatagtcagattttttgagaacgttgtgataaatttataggatagctttggatgtttaagtctcagccaatgcattggtcatttttaatggttttcttaaatttgtgcagtgtccatctgaccatttgaaaatgtacagcctgatgtactttgaaatttttctgcatttgggatatatagatagattagattagatagatagtcttgtccttcgcagcaacatagatagagctggaggccatttttctaagcaaaataacacaggaacagaaaaccaaaccacatgttctcacttacagttgggagctaagcaatgagaacacgtggatactagaaggggaacaacaaacactggggcctacttgagggtggagggtgggaagagggagaggatcaggaaaaatacctgtggtgtactttacttattacctgggcaacaaaattacctgaacaccaaacccctgtgacacccagtttacctatataacctgcacatgtacccctgaaccttaaacccacacacacaaaaaaacgcttatggcaaagataagtctaaattttagaaagattggttttgaagtgatgtgacagtctactggagaagaaactgaccatacagttagttctgcatttcctctacaggaatactattagtaaaaggaaacatagaatgtttacagctttatctcattgtcaaagaaggaagaggtaggacctggaactattggtttgaaataaaatattttactttctcatagtgggcctgaaaggaaattagggcctcacaatgctttggctttgtggacaggaattaggaactgtagatatggggtgaaatatctatatagctgggtaggggaggatatggtcctttttttatagaataaagacatgtcaattgtataggtgagaagccagaactaatggaggaatctgcatttaaataccagcgttgaacaggaagaacactaggattattgggttgtaaatgacctagattacttttgtgagaaaatattttcagagataaattgggttggcagtggcacaaaatcagtttgagagtaaacatggaaattggacattggtttaaagtgtgtggaaaaatatcttgagtgataggctcaggtataaaccggtatttcgactgtatttggaagttgggaaatgctttgtgaaatatgtcaacatactggttgcaaatgctaggaattgggcataatattggcggaaaataaaaatcacaagaatgtcatatcattcattacctgtaaaataaaaatgaattagttaaaattaaactttcctcattaaaagcaacaagctttgactttctggttttaaaatttatttgaaacttaatatttattattccatagcattatgtggtgataattacacgtcttggggatatcacttttgttatttttatttttagggaagcacactgagaaagcggaagatgtatgaggaattccttagtaaagtctctattttaggtgagttgtaaagtgtgttaactttgctagtatgtgagatacccctgaattagaattggatggacttgggaaaagccttctgaaagtataattgctactcattccccctgaaaagacagaagggctgaaagtccttctgactgtggacattcacagttatttcctctgtgacttcccgtctctcttgttccatcattgagttgattggttcagaaaagtgagtacttccaacaatacatttcctctgtggaaagattaggtatcatttgctggcatcctctgaaaacatgccagaagtttgttgaaatttagagtaaagcagattaattgaagatattcttttgtgcattttgttatgtggacttggagatgttagaacttgttcttcatgaaaggggaatggggatttttataaggtaacaggcttctgccattgtttattacagtgaatttttcacctcttctttgtcttttctttgaattggttacatatgctttgtgttttggatagtagtttggcctttgggaataaaagttattttctagttctttttcataaagtaaaccaagaatttaaatagattaaattatttctatgaaactttggaacgatatggatggggaaactatgacttttgagtattgtagttgtaggtttgatttgcattgatggcaatcttcaggaatacttaaggattacattttcttattcccttgccatttggtacagttggtataaattaacctagccactgggctaccgaagtaaggatctaagggctatctgcaggcagtatgagaatcctgctcagactagaggtaattgaagacaggtaccacttttaatctgagacactactagaatgttgaatgggcatggctatttggttgaatctctttatactttctttttacctttataacagcaccaaataatacagagcagttattttgattcttgtctttcagagtctctggacaagtgggaacgtcttacggtagctgatgcattggaaccagtgcagtttgaagatgggcagaagattgtggtgcagggagaaccaggggatgagttcttcattattttagaggtaaagaactcagaatttaatacttgaattttagaggtaaagaactcagaatttaatactttaaaaagttgtacgctctaagagggaaagagtgggctaattctgaactatagctttagtttttaagaatacctgaccattttattttaaaattatcttttactttgaaatgctgttgtttggttttctgccaggtcactatatttttaaatgagtttgagtcagaattcttgaagggccctagacatgaaaagccaaattctaaaaaccatttaacataacaaactgtgatgattctgcactattcttgttaaaatgcaagtgtttgggctatttggcaaataaggattaaaggtaattatttaaatttgaaaaattactgtgtttgtatatctccacattccatggaaatgtatagcagatactcttgctaagcggatccaagtggcagatttctatgaatgtggctccatagttgctaattgattttatttaaatcaggggtcaggagactgtaaagggccaggtggtaagtaagttaagctttgtggaccatagggtttcattcgcaaagtctcaactcttgtcatagtgcaaaagcagccacaaataatatgtaaatgaatgtatgtggtatttcagtaaagtttgatttgcgaaagagacagtgagcttggatttagcccttcatctacagtttgctaacccaagtgtgcaccctttaagcaccttagcttgatacgaagaacctcgctagcaggagatgctggtaaaatagaaattgaagctcatgtggtgactaactttaaagtcattttttatcatatgcacacatttgcaaggtagttaaaattgcataggatgtttaaggtgccaccctgggtttgagagtgtgtgtttgtttagctttttggtgattttattataggggtcagctgctgtgctacaacgtcggtcagaaaatgaagagtttgttgaagtgggaagattggggccttctgattattttggtatgtatgaattccctcacaataaatacatggtttctttaagtcacctctcagtgagatattgtagtcttccataattttgtcttctcctgaattttattttctaactgcagtcttttttggctctgagagggaaggtgtgagattttgatctttactcatttaatgaaattactgattgtctcatatctattgtcttctttctcagaagtgcactgctttaaggaaatgtttttcatagaagttagcctgttacccatctttgctttctccaggtgaaattgcactactgatgaatcgtcctcgtgctgccacagttgttgctcgtggccccttgaagtgcgttaagctggaccgacctagatttgaacgtgttcttggcccatgctcagacatcctcaaacgaaacatccagcagtacaacagttttgtgtcactgtctgtctgaaatctgcctcctgtgcctcccttttctcctctccccaatccatgcttcactcatgcaaactgctttattttccctacttgcagcgccaagtggccactggcatcgcagcttcctgtctgtttatatattgaaagttgcttttattgcaccattttcaatttggagcattaactaaatgctcatacacagttaaataaatagaaagagttctatggagactttgctgttactgcttctctttgtgcagtgttagtattcaccctgggcagtgagtgccatgctttttggtgagggcagatcccagcacctattgaattaccatagagtaatgatgtaacagtgcaagattttttttttaagtgacataattgtccagttataagcgtatttagactgtggccatatatgctgtatttctttgtagaataaatggtttctcattaaactctaaagattagggaaaatggatatagaaaatcttagtatagtagaaagacatctgcctgtaattaaactagtttaagggtggaaaaatgcccatttttgctaattatcaatgggatatgattggttcagtttttttttttccagagttgttgtttgccaagctaatctgcctggttttatttatatcttgttattaatgtttcttctccaattctgaaatacttttgagtatggctatctatacctgccttttaagtttgaaactaactcatagattgcaaatattggttagtatttaactacatctgcctcggctcacaaattccgattagacctttatccagctagtgccaaataattgatcagatgctgaattgagaataagaatttgaggtctacattcttggttgttaatttagagcgtttggttaaagtatgtccttcagctgactccagtataatctcctctgctcattaaactgattccaggagattggatttgctgtgactagatacagatggagcaaatgtcctaacagagaaatagaggtgatgctgctaaagggagaaatgccaggcggacaaagttcagtgtcgggaattttccccgtgacattcactggggcatgagattttggaagaagttttttactttggtttagtctttttttccttcctttttattcagctagaatttctggtgggttgatggtagggtataatgtgtctgtgttgcttcaaattggtctgaaaggctatcctgctgaaagtcctgctttcctatctagcatttatttctctggcaaacttttctttcttttcttttttaaagtaaacttgtgtattgagtcttaactgtatttcagtattttccagccttatgtgttacattattccaatgatacccaacagtttatttttattatttttttaaacaaaatttcacagttctgtaatgtaggcacttttattttcattgtgatttatatataaggtaatgtagggttatatttgggagtgactgcaagcatttttccatctgtgtgcaactaactgactctgttattgatcccttctcctgccctttcccaggtaatttaaattggtcatggtagatttttttcatagatttgaaaaacttttaggttgttaccaagtatgaagtataaatctggggaagaggttttatttacattttagggtgggtaagaaagccaccttgttacaaattttttaatttccaaaataatctatattaaatgagggtttctgatctgtactttgtgtttagctacctttttatatttaaaaaattaaaaatgaaaattacgttcttacaagcttaaagcttgatttgatctttgtttaaatgccaaaatgtacttaaatgagttacttagaatgccataaaattgcagtttcatgtatgtatataatcatgctcatgtatatttagttacgtataatgctttctgagtgagttttactcttaaatcatttggttaaatcatttggcttgctgtttactcccttctgtagtttttaattaaaaactttaaagataagtctacattaaacaatgatcacatctaaagctttatctttgtgtaatctaagtatatgtgagaaatcagaattggcataatttgtcttagttgatattcaaggctttaaaagtcattattcctgggcttggtaagtgaatttatgagatttactgctctagaaagtatagatggccaaaggaccgttttgtattgcttcctgattaccagtctgattataccatgtgtgctaatatactttttttgttatagattgtcttaatggtaggtcaagtaataaaaagagatgaaataatttaaattcttaaatgaatcagtttttcttccctttctcctttccgtctttcctctctctgtccttccccgaaagtctactcgggtgggcaaaaatgaaaagggggaaagtgaattatgggatcggtgttttgaaagagcaatgtttattttcagtgcttttcagtttgtcaaagagtggatctcaaaatcttgcttaaagggtaattgagatgtagcagatttatttacttagtcatggaaagaaaaaaattcagtcaaaagctaaagatttccttttgattgaagacagattggttctgtggccttggaactttcccagacttaatggggaaacatcatttctagattagcatactctttggtttaaatttaatatatacatttaatgttacttagggatacttttatattttgcatatataaagcctcatatataaagccttatttctgatgctcttagatttctgaggagtgagatgattaagttgtattcattagtgtattggtatttcttcacatccagtgaaattggagatatgttgtatgttagaagagcattctttaaattgtgttgctttgaacatgtgtaccttttctagattcagtaatcccttccccccgtcctctggagtatgaaacctttagagtcacaataaaatgtaactaaagaaaatttctctgggttgacagtcctggttatagttgaattctctctaaacagtggcccaagtagactcttttttttgtttcttttattttttaatgatttaaatattgacatttaaaaattgaagtagcatgtcagttttcttcatactactttatctctaaccacaaataatagctgaaccttttgtacttatgttaggccctggcagtgtatgtttagatgggctaagacaacatcaagaagcaatggctagataaccatttaatttgtccccaaaggtacgtttttatctgtctatttgtctatttatcgatctgtctatctaagatggtctcactctgtcacccaggctagagtgaagtggcatgatcactgcagcctctctgcttcccagattcaagtgattcttgtacctcagcctctggaatagctgggactacagatgtgtgccatcacacccagctagttttttgtatttttagtagaggtggggttttgccatgtagcctaggctggtctcgaactcctaagctcagtttgcccaccttagcctcccaaagtgctagcattacaggtgtgagccagcgtgcccgtctcccaaaggtattattataatagctatcagtaaacgctgtagctatgtgaatttcttaaatctcttccttcctatgctatgtgatttttacatagaaagcagcattgttatgtacatgtaccgctaacatttgtttcttgacataagttcagagctgtgacttcatctggactacacctaaaaccaaaaccactgagtaagattttttcattttgtgaaagttctgccaattttgcttaagtagctgtgtgattttaaaggttgccactagatggtgggctttttttaatcttcgttaatctcaaatgagttaactgttgatccttatcattcatggattctgtatttgtaatttacctacttgctaaactttatttgtaaccccaaaatcaatagtcacagggcttttgcagacatgagctgggaagtgaaaagtttgagcctcccaacacacatgttcccaactgaggtggaacaaagggatgctcatctttcatactgtgaataagtgtccttttcttgggtctttttagtgccttttttttttttttttttgcatttttgtattttttttgttgttggtgatttcactattaaaagcccctaagtgtagtgatgaagtgctgactagtgttcctaagtgaaagaaggctgtgttgtgccatatgtagaaaatatgtatattggatgtttcttttaggtctgggttacagtgctgtttgccatgagtacaatgttaatgaatcagtatatattaaataaagtgtcttaaacatgcgttaacataaaacacgcacacagcaagattatgtattgatcggtcaataaaaatgtaactagagactcccagcaacctaaccctgtatttcccctaggagcaatgttcagtatttgccaatgcagtgtttgtggtgactttatggaacataaaactaactcgtaagagaatgactaatttttttgtaatattcaaactcatattgtcttcctggcttttgagaaggctaaaacgaattcttccaaatgcctctttccatcagtacagttcccgttcattttttagtttgctgtcagtagtaacttgaaaagttctcagagtcaagagactttttatttcatgggaggtaaacagttcaaaatgaacatgctggaagaactcgagtaagaatgaaacggttggttttctgatatttttgagaaatgagtcttaattttgttactaatcaaaaagtaatggaaggttgaaagataagtgaataataaggtaggtgtaccacatatcatggtgaaattcaagcctattgctttctgtttgtagagtgcagcaaaatgtgtatataggccattggaaaaccagtccttcgttataggaggtggcgggttttgaggtagagctgtagcctgctttcctgagagtcttatttggaagtcccaaaccattttgtgctattctttgaatgtttttacccagatattttcccatttctgtgtgtgatctcctggttcttcatccacagggaagaaacatcttgaagcaggagagacagtgaatgaagtggggagccctatgctgcagtagggccacaacagttaaggaaatctttgggattaaggtttctctgttaaagagttgatttaaaaaaaaatttttttttttttgtatttttttgtagagacagggttttgtcatgttacccaggctggtctcgagctcctgagaccaagcgatctgcctgtttaggcccaaagtgctgggattacaggtgtgagcccatgcccagctgattttttttttaagcaaacaaatttgacttcataaattgggtgggatactgttgggttttgtgttacagtgaaaagaagactttggaataggtctaaaccactaaattgtgtgattttgcttactctctctgagatttaaagttcttccatgcacattggaggatgggggttgtatctgtgtttgagaggattggaaacctgtgtgttgcttctgtagcgttggtgagtgcctcacctggtcagatctcagtgaatggtagtgattttagagagacacaaagtccaggggcagcataccagtcatgtgggggtaccacggggtcagaagtgttatttgtccagtcgaggctatctttgctcacactgcagaaagcttggagacatttctggttcttgaccttgtactctctttagtgacagctccattctattctcatgcttacagtatttgaactctggcctttactggaaaagttgatttgatgaaatgaggcatttttacttttgttgactgactagtcactccatggaatgaagaccttactgtcctttgtgttttcggtcattaattatggaataagaaacaaagcctcctattaaaaggagtttcagatatcaacaagtcagggagaaggtagaggagacaaggaatccctactacactttcttctaagggaggcttcaataaaaaacctgacttagtcttttttgagccagccgtcacagggaggggcatctagagggcctcacctttccacatagcccctttcttcttttggggatgggccggggacaatcctggggtcttagggaagaagattgtggttggtgggctgtagtcagccttggctcttttcctgccttactccaggcttgtgtccctgctaggcctgttcccatgccatcctgaccttggaggactttcctttttttttccttcgttgtaattatttattctgttactggctgcttagtgtgacatatttgatgttatttcaattgtaatactcttcaaattggaacactccttttctgatattcttagcaaatccctcttttatttttgccacttgttataatatctctaagaagttactccaggaccgggcagtagggattactgattcagatgggtccagtgactagaatatgagtagaaagtgtgaggtctaatttgaacctgtcagagttactgttgcctgcgctggcccaaagtgcagatttttagtcagcttgtgataggccaggtgttttgtctggaccaggagttatctttgacttgtagctagaataaggatcctgagaagtcaggtatccacttgatgtccttttatttgacttgttaccattagtactctcctgggatcaaggctgccaagcctgacctatacccagatttcccagtgcactcaggagatcgtcggtggccttgatgaagccagtgctttttgggaaaaacggagcaaggcaacgcacgacagaagcggtgcaccaaggagtaaagattcagttccatgggccccacttgctgtttgagaaaatgtcctgcttccttcctagctgacttgactcccagcagtaacaggtgggagtgaggacgcagggtcggcactcgagtcgactgctctggctccaggcgtattttctgaaactggactctgccagcccttagcttgtcaagttagcctggccagagtctggggccaactgttccactgggccgtcgactatgacactctgctgtccatgggccactatgcacccctccactgtccttaggatggtttggagccttcgatccagggcaaggaggtggggttcagtgaggacagggctgagctggtcttccagcagtgattctcgcatcacatcgctgagtctgtagtcagcttgggccagcagctgcaggtgcaaaagtgttttcttttttatcctgaaaagacaaagttacaggaaccaaataagcaaatgtaaagaaaataacttgcctgaacttctttccccacaaacagctgttgtagctgatactcttggcgcctctccttgtgtcttctcaggcacattttaatggaaaccaggtaaaaagggaacaaatgaaaggcaaaatccagtatcctgcagtcctttgcccaattgcgatttggtcaagagcctgcatagccatttgtgctctaataatggtgatgctgggctatatgcattttctctgacaacgctaagggaatcaaaaccaaagtgatacttaggatttttcaaggagatttaaagctaatgggagaagtttctagtaggtgaattgatgagctatttgctgtctcaaaatcccccagtactgccagcctttaagttgtttcttgctaactttatttctgtttgtcagattttaaaatcacagagatgaaaatgtggtaggacccatctttaggatttcagtttctttttatgtgggaatctgacttggactctgatgtgtaagcagcttaattgacttttgtcaaaaacaggtactgctcatccagtcctgctctggaggcagggaagggaggccagagggaagcatgtttaaattaacctaagacatagatgaggaatactcatgctctactccgagttttccagctggaaacaaatgagatgtttttgctaggtgtgaatatcatatttataattagctctgcatactgcagctgagcaggtggtcaattttacaagcctggctgaaacactggagaagtgtggaagtaagttagacattctctagagaaatggtggccaagcaagggccttcgtgccttcttccagtctgcacaggtttacaggactttaatcagggttttgcttagatggtgatcaagtagtaatatttatgagccgatatgaatgctgggcaaagcagaggtctgattagtaatatcaaaacccagcagactgcaaaaataggtgattatctgagtgggtcaacgattaaagttggcaattgaaaggtttaaaggattaaatcctaattcatcctatgtggaaggatgaaaaagacaaaacgttgtgggggaaattttgatagttgtagtacagtcatgaatcgcttagtgatggggatatgttctgagaaatgtatccttaagcgcaggttttgtcacggtgtgaacatcagagagtgtactcacacaaacctagatggtgtagcctcctgcactcttaggctatatgataactgcttgtaggctacaaaacctttacaacacagtggtggatagctgtgtatataaacatagaaaagatagtaaaactgtaaaatgcagtaaaaataccatattattaatcttatgagaccaccgtcatatatgcagtctgtcattggctgagatgtcatgcagtgcacaaatgtgtaggaaataaggtgattcatgtcattctacccacttacgtcctggaccagtgaaaactggaagcccttcagaccttggctgcaagcagcatgaagggtcacaactgttacttgcccgtattatctgctgcaggaaaacttacatgcagcactgggagagaggcgagaggatggagatttcatcatgggagtgtcgtccgaacctaggaggagaaacaggcttttatgggtggccggcagcatcctttgcattcccctgaggcttcctctctcctctcagcattttgtgaatcagagattggggtaaaatgccagggatcatggcagctgcctctccagcccctctccccagtcagatcacaaaagcatctgtacagagatgttagagctaagcaatccttcattcattcactagctgcagagggccagccactgaggatgcaccttgctctcgaaaacctcaccctatttcactagagggcacacgagtgctctcaggctggaggaggatcaagtggttcttgcaaaggtaaagagaaagaaggaaatggaagaagccgggctcgaaggagacaaggcacgtggtggtggaggccctcatttgcagggcgtctgtttcccccgagcagctggctgcacagagcagcacatctgggagaggggattgttgaacacacgtggggaagctcaccctctggcgttgtcaaggtgaataaggaacccatcatccccgaacttggtgaacatctcataatggtgccggtccatattccctgtgaaggaggggaggacttagctggaaccagcaggccagggggacaggtgctcctgacctgagttctctccagggaacggaggcctgtcatcacttgagagacaggggtgtgaacgaagctgggcctcacactgtcatttcctcagggccatcagtgaagcagccgcaggagggagaaggaagcgaaacaagcaaaccctaaatggactggcttcaagtctaaggctttcacccctgcccctgcccctactccagcctttggccagagatttgaatgtgcagaaagtcatcttttcacctcgtgtatgtattgacattggctttcctcagcccagagatcctcagctgatcctggttatagtaaacagacacagctaaacttcctgaaaggcacgatgatgagccagctgtctgacttgcttccgacctaagctcctgtatgacggccaccttcataagtgtctcgtctccctagaagtccctgtgggcctggaaggtggaattactagtcttgtgtgtccgtggcctcgcctgaggccctccctgctacatatttgtgtactttcttcccttcctacctggtttcccctcacttggtgaagtgaacatacagcttccaatctgacgcccactcaggcccgtggcagggtgagatgcctgccttatgagtgacgaccccttgagcttcttccagttctttgaagagaggggagcctgttaccttctgtcctctgggacctccgccacttctgaggctgtgggaggtgcagagttactcagtcctcatgaaccaggttgtaagtttgtgctcaaggtcacggggaaccctagccacatagcagagcccacttctgctgggggcctgcgtgtggggacctacctatcaagaagtcgaagatggccatgtcgatgacattgaggagccgctggctgttgttgtacgggtagatctgtttcactgtgtcacagtaaaggggattgacctcccacctgagggggagaagaagtcctggggctggaaaagccaagatggcagggtgtcgggggtctccccacacctccccctgcccccccaatccctgcctccctgatcctgccctgggctggtggcagcttctaaaattcagaaaggccctgggcaaggacgcgtaaggctgcatattccgtgtggtgagaaggtcctgggtcctttaagtctggtggacactaaacccatggttgggatactgtgtgccagaggggagaggccggggcaggcaggaaaggaggaggtagtgaccctcacctgcttcctcgtccctccacagtccctctcaccaagcctcttggaccctgcgccactcatagcacctccatgggctgttcctgccctttctctctcacacatggttttctgcctacaatgctccgatgcccattttcatccgagggctcttctcagccttcacagagtcccttaggatctgtcatgtcctccagaaattctgcctggttacttcttttcccacgatgatcatgacggcttgactgatggatcgattcactcagtcagctagtgtggagtacctgctatgtgccagggagggtgctaggtcctggggatacagcagtgaggtccttggtctcccagggcttgctcgggaaccaggtgtccctcccatgggattctcgtgtgctccctggttatagcaagtgctgtgctgtgttttcgtgatctggctacatgtctgttctccccactagaccaaggagcttctcaaggagagagtctgagtcttccatttctgtatcccataacacctagtgttgggtatatggaaggttctttagaactgaataaatgaactaaaggggagaacagacccaggcctgctgatcccaggatcaatatgaaatggggcaaaggagtattgaggcagcttttcagattcaaaagccaagctagcaacaagtccctggtacagggtctgtggctactgtcaaggactgggctgtgtggcctggggaccaactcactcctcttttcctgccagtgtgtaggagcggatccaggggttgggcacagacagcctgggggccaggttgagggacggcaggaaggcagagagggaaccctccagcaggtgtgggttgccacagacagcatactccgtcttgcacatgtatggacacttggcgaagaagcacacgttgctcgctggaggatggggaggagagaggaggagtaagtggagggctctggaggcatgacatcttcctggcctaggaaatccactgggagggaagggaaaccctgaactcacagctcgggaagagaaagaagaagaaggaaacattgacttttccagaagtgagggtgtgaatgctactaagctgaacctcctgggaacctgctttcaaatgtcccaaccttactgcattctatccttatgagtagaacactctttattaccctgggtggataacctctggttccggggaggccagcattgtagggtcaatgcccacacagactaggtagcatctcaaacacaacctttcccatccagttcatcttgtgttatggtcaggcagaccatggtgggagtgtcttacaacttcatacgcccatcccagtaatggatagtgctagcagcagggtgtcaggccactgatgaatggaggggtggacactctggcttacgatctactcagacccggaatatcactcgggccagtactctacctggagagacaaagaaaacactctgcaggatttcattcttggtgacctctaggatttccttggtgacatttactatcctccccactgttggcggcacccgtcggaagtccagaatcctgcaagagaggaagctctgttccatctgagggatgatcagggagtgaggaggaggggttttgtcccccggccagtgcacattaggaattggctggtgtacccaggagggtggccggtgaggcgtgactctgcactgttgagctggtagtgcccaggtcaacactgggcctttaaacctaggtctaaaggagtggagatggagttgaaaatgaatccttattccgtcaagcctcctgggcaaaccttcccaccatcccaactctgttcttggtcagtgcttctcatattttaatgttcctgtgagtcacctggcaatcttgttcaaatacagggtctgattgagtggttctagggtggggctgagatttcttatttctaaaaagcttcttggaagtgcccatgacgctacagaccacactttgggtagcaatgactgagcaaatagagggagtggaatgtttaggaatgtgctttcacctaatatcataacagtgagactccttggataaataggagtgggtgcattctcctcgctctcagatcaggaaactagagcaactgccccaagcagcatggcgggaagcgtgttctttgtaaattgttcttttcgttacattcgttaaaaggccttgtgtttttcaatctggggggttgcatgggacattttgagttcaaagacaccacgatgaggcacgaagaagatagaaagccagaaggaagaaatgccagggagttcccaccttgagggtctgtctagccacccctcccagaggattggtccttataggcaatgccatctccatggggccagaccctacctgtccagatggaaagctgcgatctcagcattgtgtctctgaaagtcaatgaagtagaagaagtccactggtgtctcctcatctcgctgctgtctggaaggaaggaaggaatcacgccctggactcagacttcagctgggagcctgagaagagagctgatgagcatgaccagcgagaaaggaaaacgggcttttatgcttttcatgtacacacaggcgatggcacggcaagtcaggaatggcctgtggctcccttcgccaggagaagacaagcaaagtgggaggagacaggcttcttgcaagacactgtcctgcaggcaccaccaataccaagtttcctgcttaagaagctttggtgacagtggctgattattttcaaaacccagcagttgagagggaagaaatagacattcttctgcaggtataaacagaagagaggggaatggttagcagaaccagaggtagtgcagatccagatgtccaaggatgaagaaaggtggggtatgagccaggaattggtaatggaaaagtggcccagaaatgcaacttagtatgctggggttgaagaacagaaaagttctgggtcttagggggatgtgggggaaatacgtggaccatcatcccctcagagaaacacagccggatcatgagggctgggggcagctggtgcagaggatattgatttatatacattaaatctctaatgaattcctgaaaagcgccaggctgcctgagagtggtggggcctgctgggtgtgtacattcatgaaagtgctttttaatccttaagggccttgtggtgtgagttctggcctctaggctgactttgcctcgaggctaataaacatggaagaatgatgatcttcgaataattttataatccactgtgtgggactgttgaaacgactgcaaggcgatttagatgtaaataaacgtgatgttgcagaaatctataaataagaagcactggcaatttaaaccgtgttgtgcattttgccaaaaaacacgagtgagtcctggaaaccacagtgaggtgctgccaaaagtagagattctattttaaaaggtgcagccaccgttacagcacaaccctccgtgctcaggcctggccagcttatcatcatcactggatgtccaggctagcaaggacaatccctcttcccagtctcattttaattcctgagtcccatctgtaggaacatatcatctttcagacaccttttaggttcttctaaaacattttctcatttttgtatgatgtaagataagaagtaattttaaattcaaaggttgtttttactttagatcagtgcttctcatactttgagaagcactaatgcacgtctcattgcacattatattgtatacattacattttaaaaatataaatctttatgttcctaatgtatattttccaaagttaaagttctacattctctctttaatcagaaaaaaatggtgttcgccttaaattacttacagaaaaatacaaagcgcataatttttcaagagatacattttaaaatgatagtattttagatttgggactgaattttataaaaatgtagattacactgtgttatggtatgaaaatagataaaattggtcctgtcactgaatgttggagggttttgcattgtatttcggaaaaaagctggctagttggaacaatttttgtatagacacacttcggagatattgcaggtttgcttctagaccaccacaatgaagcaaatatggcaataaagtcattcatgcacattttttggttccccacccaaggcatataaaagttacgtttcattatactggagtccaataaatatgcaatagcattatgtctgaaaaatgtatacatcttaatggaaaaagcactttattgctaaaaaatgctaacactcttctgagccttcagcaagtcataatctttttgctgactgactggggtggtggttgctgaaggttggtgaggctgtggcaacttttaaaaataagacaataatgaagtttgctgcatcgattcacaaaagatgtatctgtagcacgcaatgctgtttgatagcattttacccaaagtagaacttctgtcaaaattgaagtcagtcctctcaaaccctgctgctgctttatcaactaagtttgcataatattctaaatcctctgtggccatctcaacaatgttcacagcgtcttcaccagaagtagattctatctcaagaaaccactttctttgcttatccataagaagccactccttattggtcgggtgcggtggctcatgcctgtaatccaagcactttgggaggctgaggcaggtggatcacgaggtcaggtgattgagaccatcctggctaacacggtgaaaccctgtctctactaaaaatacaaaaaattagccaggcatggtggcgcatgcctgtagtcccagctacttgggaggctgaggcaggagaattgtttgaacccaggaggcagaggttgcagtgagccgagattgtgccactgcactacagcctgagcaacagagcgagactccatctcaaaaaaaaaaaaaaaaaaaaaaaaaaagcagcaactctatctgttcaagtttgatcatgcagttgcaacaattcagtcacattttcagactccacttctaattctagttctcttttatttccacatctgcagttaccttctccactgaagtcttgaacccctcaaagtcatccatggggattgagatcaatcttcttttaaactcctgttaatgttgatatttttacctccttccacgcatcacaaattttcttaatggcatctagaatggagactcctttccagaaagttttcaaatgaccttgcccaggttcatcagaggaatcactaactgtggcagctatagccttatgaaatgtatttcttaaattgtaagacttggctgggcgtggtggctcgcgcctataatcccagcactttgggaggccgaggcgggcggatcacgaggtcaggagatcaagaccatcctggctaacacggtgaaaccctgtctctactaaaaatacaaaaaattatccgggcatggtggccggcgcctgtagtcccagccactcgggaggctgaggcaggagaatggcgtgaacccgggaggtggagcttgcagtgagctgagattgagccactggactccagcctgggcgagagtgcgagactacggctcaaaaaaaaaaaaaaaaaaaaggtaagacttgaaagttagaatgactccttgatctgtgggctgcagaatggatgttgtgttagcaggcatgaaaacaacattagtctcctcggacatctccagcagagctcttgagtgactaggtgtattaccaatgagcagtaatattttgaaaggaatctttttttttttctttttcccctgagcagtaaggtctcaacagtgggcttaaaatattcagtaaaccatgctgttaacagatgtgtggtcatccaggctttgaggctccatttagagcacaggcagagtaaaatttagcatcactcttgagggcctgaggatgttttgaatggtaattgagcattggcttcaacttaagttcccagcgacattatcacctaacaagagagtcagcctgtcctttgaatctttatcattattattattatttttttattatactttaagttctagggtacatgtgcacaacatgcaggtttgttacatatgtatacatgtgtgttctttgaatctttgaagtcaggcattgacttttcttctctagctatggggaaagtcccagatggtatcttcttccaatagaaggctgtttcatctacactgaaaacctattgttagtgtagctacgttcatcaatgatcttagctagatcttctggataacctgctgcagcttctccatcagcacttactgcttcaccttgtacttttatgttatggagatggcttttttccttaagcctggtgaactaacctctgctatcttccaagttttcttctgcagctttctcacctgtctcagccttcattgaggagagttagaaccctgctctggattaagctttggcttaagggaatgctgtggctggtttaatattctatccagataacttaaacttgctccgtatcagcagtgaggctgttttgctttcttatcattcgtgtttagtggagcagcgcttttagcttccttcaagaacttttcctttgcattcacaacttgcctgactggcacaaaaagcttagcttttggcttattggctttcaacgtgccttccttactagcctcctgaataatttctcgcttcccatttaaagtgagagatatgacactcctcctttcatgtgaacacttagaggcccttgttgggttactaactggcctcatttcaatattgttgtgtcttagggaatagggaggcctgaggactgggagagattgggggaacagcaagttgttggagcagtcagaacacacatttaggccaggtgcagtggctcacacctgtaatcctagcactttggaaggccaaggttggcaatcacttgaggccaggagatcgagaccagcctggccaacacagtgaaaccccgtctctactaaaaatagaaaaaattagctgggcatggtggcacacgcctataatcccagcactttgggaggctgaggtgggcggatcacctgaggtcgagagttcgagaccagcctggccaacacggtgaaaccccgtctctactaaaaatgcaaaaattagccaggtgtggtgggcagcgcctttagtcccagctatttggaaggctgaggcaagagaatcgcttgaacccaggaggcagaggttgcagcgagctgagattgaaccattgcactccagcctgggcaacagagtgagactctgtctcaaaaaaaaaaagtttgaaatattgtgagaattaccaaatgtgacacagagacacaaagtgggcacatgctgttgggaaaatgacaccgatagacttgcttgatgcagggttgccacaagccttcactttgtaaaaaacctagtatctgcaaagtacaataaagtgaaacgcagatacagcgagctatgcctgtatatttttttttttttttttttttttttgagacagaatctccctctgtcgcctgggctggagtgcagtggctcgatcttggctcactgcaagctccgcctcccgggttcacgccattctcctgcctcagcctcccgagcagctgggactaccggcacccaccaccacgcccggctaattttttgtatttttagtagagacggggtttcaccgtgttagccaggatggtcttgatctcctgacctcgtgatctgcccgcctcagcctcccaaagtgctgggattacaggcgtgagccaccgtgcccagcctgcctgtatttgttttaactgaccaggcagagatgtattaggctgtgagttatgttaatttattttcctgcaaaggaaatgctacaggttctagcagtttttcctccctgatacaaaagaactgagagtggagctcatccattgcatattagcttccagttttaaaaaatgaaaggcatccggccaggtgcattggctcacgcctggaatcccagcacattgggaggccaagacaggggaatcgcctgaggtcaggagttcaagaccagcctggccaacgtggtgaaaccctgtctctactaaatatacaaagttagccaggtgtggtggtacacatctataatcccagctacttgggaggctgaggcaggataattgcttgaacctgggaggccgaggttgcagtgagccgagatagcgccactgcactccagcctgggcaacaaatgcaaaactccatctcaaaaaaaaaaaaaaagttagagacatcctattgtgccacataaaaattttgctcggagaacagaatctatggacctggtgatttgtggtgcgtttgcagatttatcattacttttatgcttctcattaacatctcctgtttctctatcagtattccttaggttgcctctctctaactggggctgtcttttgagtatatattatatgtgctcgactaactgtaacaataatttaaactctatgacaaccagaacctcactggtgactcttgtgttcagctgagcattgtgccaaagagtcacatgtctacttgtggaacctctgctaattgccatgtgtatttgctgttatagctctcatttcaaaggaacacaatgtatttatttacatattttagtaccctatatgtctgaatacaagatgaggtctctcctgaaattgtcccttggaaaggagtctctatattcagtcctggcatagttagccaaccactttgttttgtttgggacagatacattaacctggaatgacttgactttgcgctggttttactgcctagtgtaaccggttacaacgggttgatggtggtgatgggggaggggagtggggaaataagttaatattgatttgacattcacccccaacttgactctaagtgatgatgacaaccaattccccaaatttttgacaagtaaaatctacagtgggagaacaaaagcaatatttctaaatctatatactgttttatatgatgggattttaaaatcaatataaatataagcagacattcaattgtctcatgtacatttctggagaattttaagttgatctaacaactaggattttggatctttcacataggaaaaatgggggaactttttttttttttttttttttttttttaagatagagagtctccctctgttgcccaggctggagtgcagtggtgcgatctcagctcaccgcaacctcctcctcctgggttcaggagattcttctgcctcagcctctcgagtagctgggactgcatacacgcaccaccatacctggataatttttgtatttttggtagagatggggtttcaccatgatggccaggctggtctcgaactcctgacctcaggtgatccacccgccttggcctaccaaagtactgggattacaggtgtgagccatcgtgcccagcagaggaactctttatacggcagtggttctcaaggttgcctgggccttgggatcacggggagagcccccagagctagtccactggactccctgagggtgggactcaggcataaggatttttaaagcctccttaagtgaatctaacatgcagctgatccactccaaccccttctttaaggaggtgctttcgccaaagcagttgggactgaaactctttattcggtgcttattcaagtaggccctgcccttagaaccatctactggggctctcaatgggcctccccttgaatggctgaaggtttggaatctgccagtctaattgtattccactggaagaagcacattctggaggaaagcatgacttgggtaacgtggcccctcttggggcgattttcttttctgcaggtcacctcatcatctcaaggaggagcattcccctgggctaaggcactggggccgaactctaggagaccctaacctgtgggctgcagatcctttgggggccagaaacccaaactcacaccaagctctgtctaaggactcaatacatattatttcactcatctctatgtttcacaaaattttcaaggcatgtagttgctgttgttatgaataaaatataaattaatgtaaacatgtaattgacttcctagtagcctttcttgattgtctagtttttcagttgaaacaagtattgtggtatacaagtccgtaaactttttgatgtcaaaaagagagtgctttccctggaaaaaagtatggatcaattaaagtggtggagtgtgaacttagcaacccagatgcctgggtttgaatcctgggtctgctgtttgcagctggaagattgggatgagatggtctctttcagcctcagtatctttatttgtaaagtggacattgtaagagtatctggctcataagcttgcccgtgaaccaaggacacaacttaggtcattgtgtggcatagatgatagtaagggcctgaaaaagacaagctcttagtattttcaattattattattattattattattattattattattatcaccccaaacagttctgtgcttgggcagattagagaatctctgaataactggcagaaagactttaggtcacttttattagtttttggtccaaatcttcccagggccaccccaactgggtgtggaaaggaggaaggcagtcacttacctcatgggtttgaacatggccttcccgaaatccgagaacctcagcaccagcttgaggtggaccccactgggtttcacaactgtgaaaggcagaagggtgagttaaccatgcttccgggcctcagccaaggcttgtgactctgttccttcaataagcccagctgacttcgctttcctcttatgtaatgagaccctaaagactaggatgtgctctccatagcctgcagggtaaacgccatggtgtcaggccgtagtgacggtgtccaggggctcaagacagtactttttactttgggaggtgaaggcgggaggatcgcttgagcccaggagtttgaaaccagcctgggcaacatagtgagacctccattttgaaaaaaaaaaagtacattttctgctggtatgggaaaagagcaaaaaatacaatgaagacatttactgaaaaccctgaagaatgttttcctaagaagaatgaaccctttcctctttgtgtttcaactacatctttgtagattctaattatgccttctgttatattagactagtttgtttatgcctctttctacttaagactgtacacctgggctgggaccagggcttggcaagtgagtgcttcttaggtgcagggagtgctacttccttaaattttgcatcctgggcacctcacttctcttaccctctccctggttctggagggtcaggacaatacctcactcaccttgtgttctataaaatggtcaaggcaggtgcttaactgaagaaaagggaagcctggagccctgtaaacctttattttccttttttttttttttttttttttttttgagacggagtctcgctctgtcgcccaggccggactgcggactgcagtggcgcaatctcggctcactgcaagctccgcttcccgggttcacgccattctcctgcctcagcctcccgagtagctgggactacaggcgcccgccaccgcgcccggctaattttttgtatttttagtagagacggggtttcaccctgttagccaggatggtctcgatctcctgacctcatgatccacccgcctcggcctcccaaagtgctgggattacaggcgtgagccaccgtgcccggcctaaacctttattttcaaaccttagtgatatggttaggctttgtgtccccacccaaatctcatctcaaattgtaatccccttgtctcaaatctcatctcaaattgctgagggagggatgctgtgagaggtggttggatcatggggcagcttcccctgtgccgttcttgtgatagtgagttctcacgagatctcatggttttataaggggctcttccccctttgcatcctctctctcctgccaccatgtgagatgtgccttgcttcccctcccccttctgccatgattgtaagtttccggaggcctcctagccatgcttcctgttaagcctgcagaactgtgagtcaattaaacctctttcctttataaattatccagtctcaggcatttcttaagagcagtgtaaaaatggactaatacattttgacacacaccatcagatgtagtcacatgtagacatttctgatgtgtgttccacatattgaagtaaagggatggggccactcatggctggtgatgactggcctgagggctttagggtccagacccacctataaccaggtcacagcactcctggaggggagctctgccactctcagtcctagctttttgatgccattaatcacttatcctagtgagtctcaactctggctatattagaatcacctgggcctcaccgtctgaacttgaatcaaaacccctgggggtggaggctaggcaggagcactttttaaagctcccccagtgattctaatacatatatatacacatatatatacatatatatacatatatacatatatacatgtatacacatacatatatacatatatacacacatttatgcatatatacatagacacacatttatgcatatatacatatatacacacatgcatatatacctatatacacatatatgcatatatacatatatacacacatatatgcatatatacatatatacacacatatatgcatatatacatatatacacacatgcatatatacatatacacacatatatgcatatatacatatatacatatatacacacatgcatatatacacatatacacatatacacacatatacacacatatatacatatatacacacatatatatacacatatatgtatacacacacatatatatatatatatatttttagctggagtctcactgtgttgcctaggctggagtgcagtggcacgatctcagttcactgcaaactccacctcccaggttcaagtgaatctcttgcctcagcctcccacgctcgtctaactttttatattttttggaagagacgggttttcactgttggccaggctggtctcgaactcctgacatcaagtgatccacccgcctcggactcccagagtgctgggattacaggtgtgagccactgagcccggctgattctaatattttgtcaatagtgggcaccatttgcttcttgaatttgaaagcgtgctccaatcacttgaggattttcttaagattcagattctgattcagaaagagagtgaggctctgcatttctgatgagctcctcagtgatgttgatgatgcttttcctgggccacgcattgcccagcggggcctatacaacccttccccttaagtgccttttcttgttgtgggtggatggggagaaacgttgagttctcagaggttaggcagagagccatgctccttccactcttgcccaaggtcgccactggagtgggttttggggtttgcacagctgtgagggtgaagaggctgggtgggggtggggctaggtcacttactctgggtgcagtcacatgcccccagcaaggctttctcatcttgactgtaatctgcaaaggaggagaagggcaatgagaacttccagtcttgttcctgggagagcctacaacatggaggtcccttgactctggttcagatcaccagaggggagactgtgatgtagcctggggcccttgaccactccgtgggaggtctcttggagcccaggagactgtagcctccttccctgctgtgtcccagacccctgctctctagcccttcagtgggcactccagcaatacctggctgggagactgagtctgcttttgtctctgctaataatttgctgtgtcacttagattgtcttagtgcttgacagcacagacttggtatcagcaggcctgtgtttgaattccagctccaccccctaggtccttggccaagttacttaacctttctgtgtctcagtttccctgtctgtaaaatggcaatggtaatatccatgccataaggtctttggttgaaagagaatgtcgcctgcttcaaaagcaacactcaataaatggtagcgatcaccttcctttaggtgtaccaaacaacagcatacctccttatggggtcaggatgagattatcgctataggatctcttccagagggaaaaagatcaatgcatatgttcctcttctctcaggtgtccatgtcaagcctctaatgttccactctggagcctagcctgggatgctttacccagactctctgggagaaagtcagtccccccttgcttgatcccatgaaccttaccagcactgatggtgggaaagtgcctcatgtcttgcagaagtttgctgacaacagggctggaccgggagtagagcccatggcggttaatacccaggtggaactggacccagctggcctcgagtcggagctgcagtggggggtccagggaggtaaggttcatctgctctctgtacatcttgtgtcgcctgaaagagccagatagttgttcattagaggaacaagaatgcaaagacccaccaagataccttgtctgcagttttttattcatcctttcatttattccacaagtgtattaagcatctaatgagggctaggctttaagctgtgcttaggatatcttggggagcaaaacacctgtggggtcctttcttaccctcagagggcttacactctagtgagcaaaacacacacatagttatacaatatcatacacaaatacttaattacaaaccaggacaaatcctgggaaggaaaaaaggcagattgctaagaataaaactagggcctcatataatctgggatctcagggtgagactgtgggcctctttatgcactttctcattaaaactccctatcttacatttcccagtattttatgttccaaagaatcagaagatagaggagtgaaggcaattggtgagaataaaaagaagagagggtgcagatctttaagtggggctggaagctgagttagattataaacgaaaagaagaattaatgagccatttactgtttgttctgcttgggtagccttttctcccaggaaaaaaagagaaaaataaaaaagatggttctaccatttagagatgtagactgtaatttaggagacaagttgtatgtttatgaaataaccagagcaaaatacaaagctgttataaatcaactgctaaacatgtggctcagatggaaaagccttaacattttggagaagggaaaagatgaatctatgatgaagtagcctgaggacaaccacagtgaagaaggcagacttcagctggatcctaaagaacggggcagggagggggggtggtttggcttgaaggggacagggagggtactcctgcattaaggacaacatgagcactttgagaggtaggcaagaaacggatgtatctggggatgagagaggcaggttgaataaatgcactgttgaatgagaagacggaggcctctgggttggaagggaaggcaaattagtatgatgtcatctggctgggaaaagctgattgggagaggtaggtgggattataggggcagggttttgcagttcctatatatccctgtttctcaaactgtgatagtataccttgggtctggggtggggtgaaaaacaaaacaaacatggcagatttgggcgtgtccaattttctcattggtggagagttttaaaaattaccactttgggaggctgaggcagatcacctgaggtcaggagtttgagaccatcctggacaacaatgataaagccccgtctctactaaaaatacaaaaattagccaggcatgatggtgcacacctgtaatcccagctacttgagaggctgaggcaggagaatcacttgaacccaggaggtggaggttgcagcaagccgagatcacgccactgcactccagcctgggcgacagagcgagactctgactttaaaaaaaaaaaaattacttttctatcaaaataaaaatagatgtattatggggaaggaaataaaatataccacagggatttgaatccatttgtgatcttagtgattgcaatggactgaatgtttatgtttccttcaaattcatatgttgaaattttaacttccaaggtgatggtattggagatggggcctctggggagtgattaggttatgagggggtagccctcatgaatgggattaatgccttcataaaagagaccccagagaaacccctcaccccttctgccatgtcaggttatagcaagaagacagcatctgtgaaccgggaaaagaggcctcaccagaaatggaatctgccagcgccctggtattggacttcttagcctccagaactgtgagaaatacatttctgttgtttacaagtcacccagtttatagtatcggttacggcaccccaaacagactaaggcagttttgcttcaccatttctctcctatttctgacacccagaattaagtgtaatatccccagacgtgattgcccagtgcagaggagaatacggtaatcaccacccccattcatggcgttttccttgtatgaacgtaacccaagactgaaaatctttgggaaatcatgtcacgtatctctaagaaaacatgattttatggtaagcaggattctaaaactggcctctaagattccatgccctcatttccagaacctgtgactatgaagcactctcactccatgattatgctgcgttgatggcattgttgaatttagggaggttgtcaaggtgggcctgattgaatcgcatgagcccttgaaagtaaagttttttttctggctgttttcagaagtccaaaagatccagggcatcagaagcatttgacacactattgttggctttgaagacccactattgttgggtcaagtggaaggaccagaaagccaccatgaggagctgagaatgcttcccggctgaagccagcaaggaaatgggggcaaggaactgaattctaccaacaacgagaatgagcttgaaggaggacccctgagctgctgacgaaaatgcagccaaccaacaccttgattttaatcttgtgagatcctagcagaaaatgagtcataccatcagatatggtttggatgtttgtcccctccaaatctcatgttgaaatgtagtccccagtgttgaaggtggggcctggtgggaggtaattgtaacataggggtgggtccctcatgaatggcttagcaccgtctccttggtgatgaatgaggtcttgctcagagttcatgtgagatctggatgtttaaaggcatatggcacctccccgctcactctcttgtgctcctgctcttgccaatgtgatgtgcctgttctctaccaccttctgccatgagtaagttttctgaggccctcaccagaagcagcatgcttcctgtacagcctgcagaaccatgagccaattacatctttttttaaaaaataaattacccagcttcaggtatttcttttttccttcccttccttcctccctccctcctttctctttccttccttccttccttctttcgacgaagttttgctcttgttgcctaggctagagtgcaatggcacaatcttggctcactgcaacctctacctcccaggttcaagcgattctcctgcctcagccttctgagtagctgggattacaggtgcatgccaccatgcctggctaattttgtatttttagtagagatggggttttaccatcttggccagggtggtcttgaactcctgacctcaggtgatccgcccgccttgaccacccaaagagctggaattacaggcgtgagccaccacacctcgccagatatttctttatagcaacgcaaaacggcctgaaacattatcccagacttctgacctataggacaaatggggtgttgttctaagtgtctaagtttgtggcaatttgtactcaaaaataaaaaacgaatacgtactttgttcacagaaaggctcaaaagctaaatgctcttattttaagcatatgctttcatttcttttaaaaataaccctaagtaatattttttattagatctagaaaactattcatactctgcaataaaacttttattttccctcaaaagccatgccatagtattgccttctatttgtgttggacagtgaggccattgcctggtaacactggccttccttttaaggaaagagaaaaagtatatatcacaaaaataaagcacaaagtcttcatggctgttgctttcatcaacaaaaataaaaccttagttacaaatcacatgatcttcaggggagaagtagaaatcactttgctcctgactctgcaatactggaattttccttggaaatagtttcctaaaaagaagagtatttctttcagaaaaaaagagcattttaaaacgtttgattttacttattttttaagtagcaaatgcatttacatggctcaaaatgttaaatgtcaagactcttccatcctgtccctgagttaacccgcttcccatctccagaggcaactaatgttgctggtgtttttccccattgtttttttccacttttatttttataggtatgataatataaaatccgcactgttctgaaacttgctttattttcctgtcaataggttctggtgatttttccaattcagtacacagaaagctcctcattctttgttaagttcatcacatcatattccagtgtatgaaaatcacatcattaacctgctatggtctgaatgtttgtgttacccctaaattcatatgttgaaacctaatccccagtatgatagtattaggaagtggggcctttgggaggtgattgggccatgagggcagagccctcatgggtgggattagtgcccttctaaaaaatatcctgtatttttagtagagatgggtttcaccatgttggccagatggtctcaatctcttgacctcatgatccacccgcctcggcctgccaaagtgctggggttatggtgacatgcacctgcagtcccagctacttggaaggctgaggcaggagaatcgcttgaacctgggaggtggaggttgcagtgagctgagatcacgccactgcactctggcctggcgacagagcgaaactccatctcaaaaaaaaaaaaaaaaagagatttcggaatgctatctcatctctcccactatgtgaagagagaaggcttcatctatgaaccggaaagcaggtcctcacactagacactgaatctgctggtggcttaatcttggacttcccagcctctagtactgcaagaaataaatttcttttgtttataagccaatcagtttatgttactttgttatagcagtctgaatagatgaagacatcatctacttgcaaacttctaggttgtttgtaatgttttgttatgccgagcgatgctgggacattctacctataaatatgacgttctgcatgtgtgagagtgtatcggtatgataaattcttataagtgttgttgatgggtcagagggtaggtgcatttataattgttactgatattgccaaagtaccctctgccaaggcaagatactgctaatccctctccctcagcattgtatgagactatattcaagaagctttgccaacagtgtagtgacacttcttgatccttgtcaatctaataggtgaaaaatggtatcacagtgcattttgagtttgcatctctatcttgttatgagggaagcagaacatcttttcctctgttcaagagtcatttgcattacatttgcctatgtttgtattgagttgttagtctttttcctattgagtttatacactcagaaaattacattttttctcatatgatttgcatttttctcccagtttgttgtcaatcttttgacttcacttatggtgattttttaaaatgcagaaatgttgattttttataaggttgaaatgaccaacccacttattcatggctccaacttgtgtgaaattcttaggccagtctcacgttgaaattacaagaataagaaaccaaaccaaagcatggtttcctctagtattttgtggtttcatttttttccatttaaatatctgagaggtctagaatttatttagataaaatgtgttaggtatgggttcacctttcttccgccctccaggatgactagctagttctttaacaatcatttattaaacaaattcattttttagttcactgatttgaaatgtcatctttgtcagacaaaacatttccatttgtatttgggtctatttctggaagctccattctgtttcatgctctgtctggccatattccaaggcaatgctgttgaacttttttaacttgataaaacactttaacagctggtggggctagtctttttgattgctctttttttttttttttttttaaagagttttcctatatagtccaacttgtatacttatccacatgaattttacaattatataaacgctttcaaaatggaaaccttaaaaagttttaaacaggcttatcaagtaaccttattataatgtcttcttgaattattgatgagcgtgtagttggcacatcgttctagagggtaacttcccagtacatttctttctttcttttttctttctttctgttttattttttgagacagagtctccctctgtcacccaggctggagtgcagtggtatgatcttggctcactgcaacccctgcctcccagattcaagcaattctcctgcctcagcctcccgagtagctgggatttacaggcgcatgccaccacacctggctaagttttgttttttcagtagagacggggtttcgccatgttggccaggatggtcttgaactcctcatctcaggtgatccacccgccttggcctctcaaaatgctgggattacaggcataagccaccacgcccggcccccagtacctttcaaaacgtgtaatgagtgtaccctttgacttagcaatttcacttctgcaacttatcctgtagaatgatttgcacaactgtgcaagaaaatatgttcaaagatgttcattattgtttgtaactgtaaaaactggagaaaagagaaatatctaggacaggggtatttaagagatatctctatatgtagtgacgtagaaggatgtctaatttcagaacagtgtagagtgggtctttttctttttgctaaaaatatcatatacaggtgcttatatagacatagacactttcatttagtgtgcatgaaaagagcacataccaaactcaatgatggtgctccttgggggtatgcatgagtagcttcatttttactttatatatttctgtaattgtacaattaaacaaattacactgcaagttgtttttgcatacctctttctcattcctccatgtgtctccccatctagcatccttttccatccccccccctttttattttaagcattgcatcttctcatttgaattgcatttcccagacctggcaaaaaaaatatttcctcttgtacttgcatgatctgtgacccacaatttcagatcacaatgccccatctccttgagtccctgtggttaattcaggcatgtgcaaatgacccaagctgtgtcaatctgaggattcttaaagatttttcaaaggctagcagagaagagctgttttcattttctgggattctcagctatgagaagactgtacatgaagagctgccaatgaccagaaagcctgcctggtattgccaccactgaggaaaactgaacagtgaagtaagcaacagagggcaagaggttgctcaaaggcatcgtttgagtgcctggatgcagccatcatacttggacttagttatctgaacggaatggatccctttcctccagctggttaggactaagtttttaagctgccctttgaaacatgcaaacagccgggcgcagtggctcacacctggaatcccagcactttgggaggctgaggcgggcagatcacctgagatcaggagttcaagaccagcctagccaacatggtgaaatcctgtctctactaaaaatacaaaaattagccgggtgtggtggcaggcgcctgtaatcccagctacttgggaggctgaggcaggagaattgcttgaactcgggaggcgggggttgtagtgagctgagatcgtgacactgcactccagccgaggcaacaagagtgagactccgtctcaaaaaaaaaaaaaaaaaaagaaagatgcaaaccccttcctgatgtgccatgcacttgcactggctctgggagatggtgtcagcttccacttttcacagcccacaccctggaaggacagaatctcgtctgccccatgatgtccatgcaagactctgaaatttgttccccatgtccgcagtttttaggggcttttttttttcttaaacaaacaaaaccacttccctaagatgatcttataggtgggtcaacatgataggcatctttctcaataaccttcatcatcacgcagtgcccttgtttcatctccagactaatttagagttactgttgttgttttaacctctttaaatctccctaaatctttctcttgagatggttccaagatgtcagtccacttcaatatcagtcttcacctacagaagtccttcaaggaccacctcagatgtctccatctctagcattaacctttctttgactgtcccaaataaaggataaacagcacaaaggccaaacacagggctctgttttggtgtcactggttggtgacaatgatgacaatgccatagttcgacccctgctgtaatgaagtgagagggtcacagaatgcacagcaagtcgaacaagaactaatcggtagtgcagtaacagaaagggatgcagagtctgtgtcacaaggacctggttctgcctcttaccagtggagcatcaaaaatcaatgctagtgtcgttgctatgaacacgatgtctcatgtgatcctgcagccccccacgagatacatattcctatccacagtttgcaaatgagaagactgaagatagggtacaggcttaaaaagtagtttaagccctctgagcttcagtttagctgttgtgggaaatggggaatgctgatactacctcctataccatcagaattaagtgcagtaatattcaaccatagagcaggcatccaagaatggtggctatttttaatcatgatttttaccacttataaagatgagagaccaggtggatgatgatttttttcaaaaacactgttctactggctaaccagaaacaaccagctttgcaagccactgcaaaatcccttggaacatcccataagcaagggaatggcatgtatgtcatacttgcattagacaccaccacaatttgcatgccttggcatgtgtgtgagactgcagatcatccaagggaccttggaatcctgctgtagcttttctgtggtctcttggtgtgcagactaagcaataggcaggttatcaaggcattagagggagaaccaaggcaggtctgggcttgggccttaggaggtgggtgtctgcaggcatggggatggcaggaagcctggaaatggagcttcggtggcctaaacgggagcctggagtcccatttgcttcctgggatatgggagctgagggcgtgaggagggtgccaatctgcaccctgttttcttctgggaccctgagggcagagccactggggtgctgcgagtgctccagacagggaggggagacggctgtgactcacagggttcagggaggatttggaaggttctcagaagactgggcggctccccatgctcctagtcactaaccacacggcttcaggtctgaaaatcttccccagtgcctaaatttccttgttttgaggaaatagaaggaataggtttggatcccccgcctccaaaggttttagagcaaaggtttatggctgctatattcaacagttctttggggattgaggtcaggcccctttggagtaattttgatacctgaccatgcaaatatagacacagcaatcctctccaatgggtgttacagtggagaagtggggcagtatcagaaggggaagctgagacccccatttgttcccctccaaaactatatagctagctgttcattcctaaggtctcccagctaaaaagcacagacatctttggttcctgcctcttcccaatcatttttaaatcctggagtttaacctccattacctccttttttttttttttttttttttttttttgagatggagtcttgctctgtcacccaggctggagtgcagtggcccggtcttggttcactgcaacctccgcttcctgggttcaggcaattctcctgcattagcctcccaagtagctgggattacaggtgtgtgccaccaagcatagctaacttttgtatttttagtagagatggggtttcaccacgttggtcaggctggttttgaactcctgacctcaggtgatctgcctgcctctgcctcccaaagtgctgggattacaggcatgagccatcatgcccagccatccattacctcttaattttcccctttttttctgttgcctgtgccttaaccctcttatctggatcctggaatagtctctttactgatattcacgacctcagtcttcttcccttctccactccaggcctccatcactgccaaattcactgtccagggcacagctgcaagcacttatttccctcctatgaaatccttcaataggtccttgttgtccgtggactctcatccaaattcctactttagcatttccccaagtgttttacttctttaaatcttcctccccacccattgccctcctacctaagttctatgtttagtgttcctgtactttcctcccacctcatgctgttccatcaccttggaatgccttcttctacactttcatctccagaaattcctcccagccaaactcccatggaacttcctccttgaatcttttccagtcctacaaccaaccagatgtgagctttctttctcactcccccaaattttcataaaactccaatttcttttattgttcttgccatattttgagtaatagtgatttaggcatatttctcatttcttctaactgagggtgggcagaggcaatgtcttactcaactttgtgcctcgtccaaaacttagcacagcaccttgtgcacagaaggtacttaacactgattatggaaagaagttggaagctctccactagtactgacatatgcagctactatggcctgagtatatttttggtattagtgggttacaaaatattttaggggtttgatggtttataatccaagacaaatatggtctttttcagagtatttcgctccaagttgtgtacaaagaaaactttctaaataaaggaactccccaggagttaggcaatgctacagcagggtcaaagagggaaaacagcaaaagcgttagtcaggattagacacttctctatgagtttgaacatcactgggtagttcagagctaagggtttgcataggtatacaatgtatctctctgtttttagttgcattgggacaaactaactccaaaataatttaattcaaaatcattttgattgcactggagaaaacacatttcttttgatgggtagttttaaatgctgactctccaggagaaaataaaagctttcagtgtcttcagatatgaaaataaacggtcaacatgaaagatgttattctgatctttcaaaatttaaggaacttccttggatttacttctgcatcttcggtcacttagtccgtgtctccttttcagtctaccttggtctgtcattaaatacaacaattctgaaagcttctgttctggcttttttctttctccctctagccttgctttggatgtgattgcatccaccgccctagcttcaatgatcacttgtgtgcaaaggactcataaattttttcttccagctctctcagcagtagactcataaattccactgctcatatctgtaaaggacaagatagcaaatattttagccttggtggaccctatggtctctgtctcaactgcccaaacctgctgttattgcacgaaaggggccttaggcaatctgtaaacgaacaggcaaagctgtgttctaatgctgctttttttgtttgtttttacaaaatcaagtggtcatgggccagattttgtctgcaggccacagtttgccaacccctgccttaaaaacatctacattcaacatgtttaaaactaaactcttgattgtctctctaagcctgggcctcagttgtggcttctgttctgcccagtgaaggccacctgtcataggtcaggttctccctgaagctggccctgggctttgggtttaggagcaggtgattcattatgaaggtgctccctggagaaaccagtaagaaagtgaggacaggggaggaagaagccagacaaagaagtcctagtcttggtctaatcctttggggagctgttaggcttggtatacctgaaagtttgtcctgcattgaagcaaaggagctgagcctttgtactctgatatggtttggttctgtgtccccacccaaatctcatctcgaattgtaatccccacgtgtcaacgaagggaccaggtcaaggtgactggatcacgggggtggtttcccacatgctgttctcatgatagtgagtgagttctcaagagagctgatggttttagtgtggcacttccttgttcttgcactcgctccctcctgccaccttgtgaagaaggtacctgcttctccttcacctcccgccatgattataagtttcctgaggctcccccgccatgcggaactgtgagtcagttaaacctcttttcttctacattactcagccttgggtatttctttatagctgtgcaaaaacggactaatacatactcttactctggtcagtcattggctatgactgttcttggggaaagagagaatagggggagtgtctgagtttactaaggctgccataacacatgacctcaaacttgatcatttaaaataaaagaaacggctgggcgcagtggctcacgcctgtaatcccagtactttgggaggccgaggcaggcggatcacgaggtcaggagatcaagaccatcctggctaacacggtgaaaccccgtctctactaaaaatacaaaaattagctaggcgtggtggtgggcgcctgtagtcccagctactcgggaggctgaggcaggagaatgacatgaacccgggaggtggagcttgcagtgagcggagatcgcgtcactgcactccagcctgggtgacagagcgagactccatctctaaaataaataaataaataaataaataaaaattttaaaaataaataaaagaaacttactgtgtcatacttcaggaggccagaagtgcacaatcaaggtattttcaagactttatgctttctggagactctaggggagtttcactctctaggggagaatccattgcttgtttctcttagcttatggtggttccaggcatccctggtcttgtggccacatcatgctaatctctgcctctgtggttaccttgtttcttcctcttctcttaattctttcctctcctataaggattcttgtgcaagcattgagatacccagataatccaggtttatctcttcatctcaagattcttaacttaatcatatgggcaaaggccctttttccatataaggtaacattcaaaggttccagggatttgacgtggatatattttgggtaggggtgggagcaggggtggggagtttctaacagaataaaattcctaggcactgcccgatctttctaagggtgaggtaagtgtcttagccactagccacaaagcatacagaagctccctccttttcagtctaccttggtccatcattaaacactacaattctgaaagcttctgttctggctctttttctttctccctctagccttgctttggatgagattgcatccacaccccccagcttcaatgatcgcttttgtgcaaaggactcataaattccaggagttatcctggagtcagaattccaggagttatccttgaaatttctctctcccttcccaaaatgtcccctgcatcaccgaattgtgtagatgttacctcctttaacagctcctgaatctgtccacccctcttctctaccaccatcaccctagcctgtcacctggacttttccaatagcctcctaactggaagttccactgggactctctttgatcagcactcctaactgtaaccagaatgattgctttttcaaaatgcaaatctaaacctttagcttcctgctcagaagcactcaatgtctctttattgatgttaaatgaaaacaagcttccttaggcctgcactggccaatatgcaatagctactagccacatgtgactaattacatttaaactaataaaaattaaagtcacaccagccacacccaccacattttaattgctaagtagccacatgtaactagtggctacccttttgcacagcacagatgataaaacattttcatcattgtgaaaagttctattggactcagtggtctaggttcatgttcttctatcccagctacaaaggcaatgatctatccaccatgggtgcttggaacagccatatccttggcctggggcacactttcctcatctttgcctcctcgtttgtctcatttgtctaccagctcaggccttcattccttggaagtctgcattggcctccggagaggtcccatgtctctgtttctgtgttgcgttgcacagtgtctctctcctttatccatgctgcacttacagtttcacatttgcttgtgttcatccaccccagacaccacaaaggtagagtctatttctgtttctgcttaacccttgaatccttagcatcctgagcacataacagatgttcaataaatatatatatatttctgagactgagtcttgctttgtcgcccaggctggagtgcagtggcatgatctcagctcactgcaaccaccacctcccaggttcaggtgattctcctgcctcagcctcctgagtagctgggattatgggcacctgccaccacacctggctaatttttgtatttttagtagagacagggtttcaccatttgtcaggctggtcttgaactcctgacctcaagagacctgcctgcctcagcctcccaaagtgctgggatcacaggtgtgagccactacacctggccaacagatgctcaataaatatttgttgaatgaattaatgtgctccttatctcacacctagtggatgatagcttcaggagaacgactttctgtatttttctggaaagacagctaatgggaaccataagcttactcaagcccagtataggagaagttgatttgcatgctctctggataggatatgtttgctataatgttaaaatttccagaaatcctgcctcccattcttccttctttccaactttgtcacatcttaaatttcctggggctttcctgagttaggatgaaccgaaatgataatgagaaataacttctgtcctttctgctgaaataactagtctccctttggcatctggccacacattctcctccaaaagtagtgatgccaagtcctctcaagtatagctatttaaattgcatgccacagaatttatattttgctaaattcactggttactaagctattatgagaaatggcactctttctgttttgagagctcatactgaggtctcctggggaggaatttggtgataatccattaagtattttctaattatttgaacccctgtacatttcctggagctgttcattccagagcaattctaggaggcactgtgtcagatggagaggtatgatggggtccgcccagtcccatcacctgggttaggatggttgacctgcagaggttcatgaagctctggtcatcagtgcctgggatcccaaatagtgagaggaaaatgagaaaggggctgtcagcactcaggaaaaatctcttcgttggaaactgaatttactgctcattgtgctataccatcagaagagaaatggaacagcaatgaaagagctggagccatgtgctttcttcccagttaaactctaagtttcctgagggcaaggatctaccctggatttcttttgcatcctcctcagtatttgaaggagcactcaggagtgctatgcacacagtaaatattctataaataaccgattattagatgcttgaacacgtttcctgctgccaaagctccatcatactccaaaacactagtatcaaaacttgaggaagaaaatcccttggacacaggaattgcacttgaattctatccatggagttcataaggttggtctcactcatttaatacatttccaagagcactctgtcacacagacaattagaaaagcattatagtgaacttctatagcactcggcttttaaattaaatcttgcatctgtttgatccatatgtctctttcagtgttcttatccttgacgtgggtcctagaaagaacattttctcaaggttgtttttcttttttttccccatggctgtgatgaatttggaagaatcctccttcatactgttctatttctcctgtgacacggaaggattcaggttttgtgagacctgaagctaatacaatttggaggaccatctttaagcaaaagagtacaaaattacgaatacaaaaccaggtatgagagtaaaggtttatttagaatgaaaaagaatcaataaattactggtgacttgaaggcttttttctgagatatcaaacttatgtagaaatatatatatgtgtgtgtgtgtatatatatgtgtgtgtatatacatacatatatatatatatatatatatatatatatatatatatatatatatatatatatgtagcagggaatataggtgcattccactacaactggctattatttttatttttatttctttgtagagacagggtttttccatgttgcccaggctggtcttggactcctgggctcaagccattcacctgccttgacttcccaaagtactgggattacaggtgtaagccacagtgcccagctgtatgtagaaatatttcttgatcataacctggctcccttctcaactccacagcattcagcacccacaggggaagtgaggggaagtgggctgaggcttcatcagcttcatggtaaatctgcctctgacaggcaattgtgcaattcacaatccaggcgtatttgttgagcactttcagagacattaagtctgggtccttatccaatggactttcttgattcttctaaccagtttctgagtatgagaccatcagagcagtaacactgagtagtagtaactgggccaagaagggcatgggcttttggaaatggctttttggtgttcactgttggaatgggcttcatttctgaaacctcagcactgcgtttgtgccggctgcctgtgttcatgatagaattatgcagaacgatcaactctccccaaaatgcatcttcagcagaacgagctgactcatcatcagaattctatgggttgtcataagcaggctgaagaattgtttctgttttctttttaattttatttatttatttatttatttttgttttaagaattgttgactgacttcttcccaccgctccatctcatgggctcaaaaaacatatttctcattgcttccctttctgttcatctgcctcctcgcccatttatctctgtgtcctagaggccaagggaagtccaaacaaagctctgaggcaatgtgagtgggccggagctgcagtgatctgctagaccccaaagtgagctcccaattccttctcatgtcacctccccaaagagaaatgcacccccgctttggaggctgtccttccagccctgaaagattatctgcttcagctagctcatgaatcaaagcttgattttaaggagcaggtgataggtggtaaatgctgctgtatctgtaaatcagagtcaccattagtgatgggtttgtgaatctagaaaggggaaagggtgggagaggcagatccctcatcccgagtcctggctctgccactcacagctgtgtgacctagggcaagttatctaacctctctgcgcctcacctcatgtgaaaagtcaggataataaatgtacccaccttatagaattttagtgaggattaaatgaattaaagtttatgtttcttagcctgttttttgttgctttataacaaaatacttgaaactgggcaatttataagaaataacacttctccctttccctttctttcctttctctttctttctttctttctttcttctttctttctttctttctctttctttctttcctttctttctctctctttctcttttccttctttccttccttccttcctttctttcctttctttccctctctttctcttttccttctttccttcctttctttcctttctttctctctcttttcttccttccttccctccctccttccctcctttctttcttcctttcttcctttcttttctttctttcttttctctttttttttctttcaacagagttaagctcttgtcgcccaagctggagtgcagtggtgtgatcttggctcactgcaacctctgcctcctgggttgaagtgattcagcctcccaagtagctgggaatacaggtgccagccaccatgcccagcccagctaatttttttggtatttttagtagacacagagtttcaccatgttggccaggctggtcttgaacttctgacctcaggtgatccgcctgcctcagcctcccaaagtgctaggattacaggtgtgagccaccacacctgaccacatttatttcttacagttttagaggctgggaagtccaaggttgaggggcatatctgatgagacccttcttggtggtgggaactctctctagagttcttttttttgagacagggtctcactctgtcactcaggctgtactgcagtggagctatcatggctcattgcagcctcaaccttctaggcccaagtgatcctcccacctcagcctcccaagtaactgggaccacaggcgtgtgccaccatgcccggctaattttgtttatttttatagagacaggatctccctatgttgcccaggctggtctcaaactcctaggcctaagcgatcctctgcagagttctgaggtggtgcagggcatcacatggcgagggggctgagtgtgctagctccggtttcctttcctcttcttatagcaccatgagacccactcccacgataacccgttaatctgttaatccatggatccataaatgagttaatccattcatgacagtagagccctcataactcaatcacctcttaaggaccccacttctcaacattgccacattggagattaagttttaacatgaattttggagaagacaagcattcaaaccgtaacatcatgtgagttattgttactgtgacttctgggactcagtactggtaactttatcctttacaaaggggaaggaatactgtgaagaattatttccaacttctgcttaatttcccagttacctgagttctgcttaccaaggtgaagtcaagagctctatttggcattccctaggatggtccctggggtaggctgaataatggtgcccccaaagagatctgcgtcttaatctctgggcttgtacataccctatgtgtccagatgggctggcagatatgattaaagtaagaatcttgagatggagagatgatcctgggttatttgggtgggccctacatgtaattacaagaacccttataaaacagacacatagacaagaagacagagaaaagaggatgaggcaatgtgaccacagaggcagagactggcatgaggtggccactagtcgataggtacaactattatgtatcaatatttttttaaaaaagaaattcctggagtcaccagaagctgaaagagataagaaatggattctcgcctagagcctcaggaggggacacagccttgcatacatcttgagcttggacttctggcctccagaaatgtaagacaataaatttatgttgttttaggccagtcagtttgtaataatgtgttctggtggcttttacaaatatacaagcaggccaggcacagtggctcatgcctgtaatcttagcactttgagagtccaaggcaggaggattgcctgaggccaagagttcaagaccaacctggccaacacaggttcactttactttacatatatatatatattttatatatatatgtcttcactttatatatattatatattttatatattatatattttatatattatatataatatattttatatattatatattatagatattagatattatatattttatatattatataatatatattttatatattatataatatatattttatatattatataatatattctatattttatacattatatataatatattctatattatatataaaatataatatagaatattatattttatatatattttatatttatatattatatttttatattttatattatatatattatatattatatattttatattttatatattatatattttatatattatatatattttatattttatatattgtatattttatattatacacacacacacacacacacacacacacacacacacacacataatcagccattggcagttacagctgccaccgggcagggcgtgatgtttaggcactgctgtttctgagaaccaagtccaaagggcgccccctaagaatggcctttcccttgcccaggagctaaccctggggaagtggatggtgttaggctggagagaggttcttgcttcttcatctcatcccgaattctgaaacttggctgcatgctgagccctttaaatgggtctggccagccaatggaacaagctcccataagagtacaaaagcccagtgctcagccagctccaaattcgtagtgccatggtcctctctggctctctagaccctgcccccatacctgcctcaagcactctttgcttcaatcccccacacctcacatgtaataattgtcaccatttctggagccatggctctctgccagcaccttttatgaagacttcacatgtgctggctcatgactcttcacaacagccccataagacaggtccattgttagcccattttatagatgaggagactgacttgagctagctcaaggtcacctgcctggtgagtggcaggcacagtgcagtgatttggacctggccgactggcttcctaggccaagctcttcatcatgaccctacgtgctgactgcatcatggtccatctggcacctcctggctcctcatgctgcagccctgagcccaaggctcccttctgactgtcccagcctcctccccagggagagagacctgtaagtccataaatgctgtgagggtgctcagtctgggcagggagatcctcgctgtagacacctttcagacacttagtggtgggtactacagaaaacgttagttacatgtagttggggacctagggacaaaacgacttgcttaactgatgagcaaatctgagaaaaaattaggaatcaaaatatgattgttttaaatggttttatcaaagtggctagacttgccctgttgattttgctcagccctgttcattttgaatagcctaacagctctgagtcaaaatggccccaggctgagctagttgcctagggcaggccaggagggacattctaggagctgggactctgtctatagtaaaaagtctgcttatctaccctcacaacaactttcagacaccctggagaagaatgaaagaatgatccctcatctaagagtccccagagtccagtcagggaactagcagatgccttctatccgggccaagtttcccagattcttgttttggctatagagctaagatccaaaacatctagctccacacaaataaacttagaaagagctgccaacggtgaccactctgaggggagtgaccatgtgcagaaagacagtcaaggcttgcagaagtcctgccatgacggctcctgctcagaggacatctcttaaaccatttccttacgtagcacacaccaattcccctctattctgcatggtacatgacacattttgggaaacatgaaatattaaagctggactgcggagctcctcaacctaattgtgatgtgatgattcacgcagcacaggggccttgcagctgcagaatctccctttctgcagaactgttgcctccctgctgtagaccagtggttcgccactgggggcgattttacccctcaggggacatttggcaatgtttggagacatatttggttgtcatagttggtggggagagtgctgagggctgttgtaaacattctccaatgcaaaggacagctctgcacaagagaaaatgatctggccccaaatgtcagtaatgctgagttagaaatcctgggctagagccatagaataatgagcaaataaagcacttaatcctctgatgatggcctgaaaattgctctgatggattttgcactcggtgtaatttaatattttccatagacgcgtaaaagccttcctcagagcctctccactccttctatagcttctgcacagccaaaaattaaaaatgttacttaattgtttaaaaaaagaaaaccaatttgagtcagcaagcatttagttgtcagacttctaccaacctaacaagcatattgataaaacactaacacacgtgttagttgcaaaagatgcaatattgatttatttaaatgtcatcattgtggtgcttttcaatcttccaactgtgtaatcctaaaataaataaatatatatttcacacaccacacacacacacacacacgcacactattagcaagtgacattggatagacaggtgtcctctctttcctctaccattttcctgaatgcaaaaagaagaaacgtggtgtaaaggcaatactctgagagaaccaagacaaagcaggagctttaaaaatccaccccctgggtcctctaataatcaaaggtttaccagaatatatttattttcaaaagtgtctgaattctgccttactgcctatcatacaggcatgggcatttgaaagagagatggatttgaatgttggggaatctgcatgtaggtgggtacaatacggggttaggctggggcacatattttcatggttcataagcaaatttccttgtggctcactcagattaaattctttcaagtccttggcctgtgagctagtgctaatttgcgtggtattatttttccacctgatttgcaaaccaagagaatgatagcaaatgttggcctcctttcctcctcagcatgaccagtcacccatgtggtaggataatttattgagatattaatgtgttttttgttcttccggaattttacccacccctgttctcagaagatagctgggcctttgtgttccttgcctcagagtgtttttaggatccaggaccaaggggaagtttagacaggtagccaggcttctctcactccttccttggatttttaaaaatgtctaggctcggccaggtgcagtggctcatgcctgtaatcccagcactttgggaggccgaggcaggcggatcacaaggtcaagagatcgagaccatcctggtgaacatggtgaaaccctgtctctactaaaaataccaaaaaaaaaaaaaaaaaaaaaaaaaaaattactgggcgtggtggcaggtgcctgtagtcccagctattcaggaggctgaggtagaagaattgtttgaacccgggaggcagaggttgcaatgagcagagatcgcgccactgcactccagcctggtgacagagcgagactctgtttcaaaaaaaaaaaaaaaacatgtctaggctcagtgaaggcatttgctaggcagggggatttaacagagaatgtgaaagtgcataaagaagcacagaattttggggaagcatgaagagactccaaggttaggaaaggagagttgactggggtctgtgtctggcctgtttcttggaggtgatccaatgtgctggggaacggttaggtgtgtgcagagaaagactcattttaggcaccagaaaccgagtctcagccaataatcctgtgcttgaacttgatgcagaaccaacagtgccacccacctgcacgagaccaggtgatggaacatggactatgggtcctcctcaaatgtgctcccagacaccctaaggacattgacccaacatgaggggcttggggtaaggagctccagtgatgactcagactaaatttctagccaaccaaacagaaaagagggcctagagtccaaagtgattggacttttgaaaaataaaccaatgctatgttactttgatttttgagtttgtagagcaaaatccatctgaattcatttacctattgagtgagagtagggtaggttctgttagagcaacagcttaatcctgaaatcggagtggcttttcaaaacaagagcttatttctcactcatgctacttgtctcgtgaaggtcagtagggattctgctccacacactgactcagggacccagcttgatgaacacaccaagatcccaacaaatggtcttcacagtcatcagggcaagaaaagagaggaactggaagatgaagtgctggctcttcaatgctttgggaagcgacgcagatcacatcaactgataacccattgtccaggactagtcacatgaccccaactaactgctgggggctggaacacacgggagaacaagtggactttggtgagcagaaaatgcctctgccacagcctcttggtacttattgaacataggatgtgtcttttgatttaatactattaatagtttgcatttgcataaatctcattataaaggcattttaggttatttccatttattgtcttattctcctctcctcaagctcttaaagaaactaaggtccacaaagtggaagtaacaacataataagtggaaaggaggaataaaagccagggttgtgacctgagctttttctgctcttccacagtggctgcagagaaacgaatgctttgtcaagaatttaatttgaatttccttggagccttcttaaagatcatggtggtggtgggtggggggagacacagaacctgattaactgtttgctgttgagaaagcaatgactgtaccaagattttactgagatttttgcgaaatgggctggtttcccgaaatgggctggtttcccgacaaaaactcattcctttctcgttaaaatacaattgcttcctcttctgggagctggttttatgctatgttgcaatgcacctcttgtttccactccagctaactgtgtccttaaccttatcctgacctcatagaaccacagccctggctcagcacttaagtaaaacccgcccagagaggggcatggggcttctgagctggagtggccccgaactggaagggacttgaatgagaaggggcatatcatggattgtcccagggtggaaaccacctggacttctgccttggtgagcaaaaatcagactcaagaggaaccagtgtcccaaaatgggcctacagtgtgaatgaggaaaatagctaactacctcttatgtggcactcacatggggccaggcagttttaagcactttgctcttttaactcatttcacccccacagaaactcctcataaggtcagtattattattattaccaccattgtaaacatatgggaaccagatataggcagcaaaaatgacacctccaaggtggcactgctagtacaaggcagcgttgcgatgacacccgagtatgacatctgaatatgtgtaagatactccaccaataatgatttttccccctgattaggaagaccaaaaaacttttgtataaaaataaaaaactatggtgcataaggagggatgagttggataacttttaaaacgtctgatgcttattgccaacttgccctccagaaagagaaagcaacctatacttccagagcagggtactgggagtaattctgcctcgataatctctgggccctgatgcaaaggggtgtactgtgacagcatggctcactaagcctcctggacacaaatctcttctcaaattggtttccaggactcaggctcagacatgaaataaagttaaactcagtgttgagtttcggctctggagttgaaaaggtatctccgaaatgcagtttttctttctttctttctttctttctttctttctttctttctttctttctttctttctttctttctttttctcttttctttctttcttttctttttttcttttctttctttcctttctttctttctttctttctttctttttctttctttcttctttctctttctctcctttctttctctttctttcttttcttttctttctttctttcctctctctctctttcttttttccttttttttttttttgacagagtctcactctgttgcccaggctggagttcagtggtgtgatctctgctcactgcagcctccgcctcccgggtttaagcgattgtcttgcctcagcctcctgagtagctgggactacaggtgtgcaccaccatgcccggctaatttttgtatttttagtagagacagggtttcaccatgttggccaggatggtctcgatctcctggcctcgtgatctgcctgctttggcctcccaaagtgctgggattacaggtgggagccactgtgcccagccaaaatccagtttcttgtgtaacatactctgtctgagccactttcttcatctgaaaatgaggataaggactgtacctgcttatggggttgttgcagggagtaaatgtgtggtgggtgaagtggtcagcactgtgcttaacatagagtaagtgccgcacaagtgtcacctgccatcaaagtgtcaccgactcaccagaggcacggtttgaagggaaggtctccagggagcagagattagcctgtttaaccagtttaataaatgctttagtaaaagaaaaagagttgttcctagaatcagcagaattcctgtcacttcaaggaaagtcattgagaaacatgggctcagcagtttgcactgagaagggtatgtgcatgtaggaggggaaggggggcagagtttccaaaataagtagattgattgcgttctgtgttttctccccatttgcaagcattaggtaattgacgtcgaagtgatggaggagagatcaatatgtgtgttttctctctcgctagaagcatgagaggcagctaagtcaagtgagggcgatggctgggctggaagcactggtgcctttccctgacaacaggaggccacaaaagccatttcatcatcatcatccacccaaacatcaaacataaatggataaggctgcatatcgataagtatcaaataacctgtaaggaatattaaagcataatcaactagcagtggtcctttatctgcttgaggatcagtgctgtaggaaaccaggcaccctgctcagtgtgttctgtacatgatctgactccatcttcccagccacctcttggggtccagattacatcccactttatagaccaggaaactgaggcttggaggaaatgagccttggccctgcatagcgcttatgtggaagagccaggattaatttttttttttttttttttttttttttgagacagagtctcgctctgtagcccaggctggatggagtgtagtggcatgatctaggctcactgcaacctccgtctcccaggttctggttcaagcaattctcctaccttagcctcccgagtagctgggattacaggcacacaccaccaggcccagctgatttttttttttttgtatttttagtagagacagggtttcaccatgttggccaggctggtcttgaactcctgacctcgtgatccgcccacctcggcctccgaaagtgctgagattagtgccaggatttaaacccagagttgcctgactgccaagtttctcttaaccattcatttaccaaatatttgttgagtgcctactatatacaaacagcattttagatacctgggttacaatgatgaagacacaaagaagcctccatctttctattagttttctgttggggccctaacaaactaccacaaacttagtggcgtaaataacaaaaaattccttctctcagttctggagtctgagagtttgaaatcaaggtagcaataggactgtgctccttctggggactctaggagaaagccccttctttgctgtttctgtcttctggtggctattggtgttcctcaacctgtgaccacctcactctactctcggcctttgtggtcacgttgtcttctcctcttccgtctgtgtctaatctccttctgcattcctcatataaggacacttgacatggaacttaggggtcactggataagtcagaatgatctcctcatctcaagagtcttaattatatctgtaaagacctgttttttttaaccacataagatgatagttggctggttgcggtggctcatgcctgtaattgcagcactttgggaggccaaggcgggcagatcatgaggtcaggagatcgagacacagtgaaaccctgtctctactaaaaacagaaaaagttagccgggcgtggtggtgcgtgcctgtagtcccagctacttgggaggctgaggcaggagaatggcgtgaaccaggaggtggagatcgtgccaccgcacaccagcctgggtgacagagtgagactccatctcaaaaaaaagatgatagtcacaggttctggggattagaacatgaatatcatttggggagccattattcggcctacctcaagggccatcctagggaatgcaaaatagagccaccactcaaaccaattcaacccttgaagagtttaagatctggctgggtgtggtggctcacgcctgtattctcagcactttgggaggacgaggcaggtggatcacttgaggccaggagtttgagactagcgtgaccaacacggtgaaaccctgcctctactaaaaatacaaaaattagccaggtgtggtggcacacgcctgtaatcccagctacttgggaggctgaggcaggagaatcacttgaatccaggaggtggaggttgcagtgagctgagatggtgccactgtattccagcctgggtggcagagtgagactccatctcaaaaacaaaacaaaacaaaacaaaacaaaacaaaaaaaaaacccaaacacaaaaagcttaagatctaatgaggctatacactaagcaaatcaatacacaaaaaggcattaagtggtgttaagagcccagctgaaaataaaacagggcttggtaaggacaacatctgggacccctgtgggtcagcaggacaggaaagttctctctgagtgggcagttttgaaagtagacgcaaaggacaagaagcagcctgctgatcatcttcacatcttcagtagagcctgaccattctggttcatcagcttaatttatgccttaatgagtaaataatacttctggatgagttgggcatagcatctcctgccaggagagggaggaagaagcattttcttatatgcaaataaaatggctttaatatcataaactgcaagcagccttaacagaccactgtcttcacaactgccaaaaagagctgctgcggaccaactgctataaatcctagctcatcatatttggctgacttcccctgccttttaatgattttatagctaataacagaacagaatgtcgtctcattcagttacttggggtgtacattttgcagtgagttaaacccagagaggccactggtgagttacgctgataaagttaggcattcaatggttgctttattgatgttttttaatacctaaggtaggtgtttggttacagtctcttggagtatttttccagccaaacattttgcagccacattccatggcatgtggctttgaggtattgattacccgctggctcgcctgtcacagcagattcaaaggtattgtctgaagggaatctaggctggcccttagacctgtggcttccctgtagacagaggtcagtggctttgagttcacttgcctatcctgtttgactccatgacttcagaaagagccttttgttcctacctctaagttcagttaattggtaaatctatttcttttttttttcaaataacaaacactatgtttattaatatccctctattcaacccctctgcctcccacacttccgagtcttcattgtgtattattgcactctcttcatccgtgcaaacacattcttttttgtttttccaccaataccatggctttatttattttttttttaggttttatgtaaatttttctttttttaaattatactttaagttctagggtacatgggcaaaacgtgttatttttctgtactgaatgacaaccctgaaaaactgcactcaaagtgtttctgaaagttttatcctaaatgcactgccactcaatgtcagtgaaaagccctgctgaaaaaatccaggttcatggagggctgcccaaagaatgtgcctgctgccctttcctctggagcctcagcaatttaaattctctcctgagatgagacaagaaagcaggcttgatcaccacgatcgcgaatgggtggggtggtgcctgggacatgactttggaatttgctgtggggcacagtgctagcagagagactcactgagagccattgctgggtaattcccctatggatgtgatggaaaatgctagtcctgacaccatacagtgtcctctcttggaggaggtgaggcgagaaggacaaggaaggtattcatctgcctagtcactaccaggaattaccagtgaattacctagtcactaccagtgcccttcctgggtcactggctgctttttaccttatagacatggttggtggctcctccccaccaagcagggctgactctgtggtgggaaggttctcatggcaagtgttctgagaagttcctcactcttggctccactggtcttgtgtatccttctttttcctttggcacatttttctcaaccattttatattgtgatatatcagaattattttgtgatttacctaaaagattaactcttggataaagatataggtatagataatctactagataatcttttatctaaaagattaaattttttttacaagagtgaagataaatggtaactgcatggcctttgtatttgtcatggaacatgattcaagtggactgaatggtcccccaaaagataatccctggaacctgtgaatgtgactttatttggaagaaggctttcgcagatttaactaaattaaggatcttgagatgagatcatcttgaatcatttaggtggacctgatagccaatgacaagtgtccttataggagaaagacccacatagaggaggagaagacacagacagacaaagacagaagaggaggaggcaatgtgatcatggaggcagagattggagtgatgcagccagaagccagtgaaagctggcagccacaagaacagattctcctctcaagcctctggatggcgtgctgcccttctggcaccttcatttcagatttctatcctttagaactgtaaataatacatttttgttgttttaggccacccacagtggcttaaacagtgacaatttgttacagcagccctagggaacaaatatagttaccaaattccctttcagaccttgctcaggcaatgctaagagatctgatggttcaagacttgacttccaactttctttttttttttccttttgagacagagtctcattctgtcatccaggctggaatgcagtggtgtgatgtcgttcactgcaacctccgcctctcagattcaagcaattctcctgcctcagcctcccgagtagctgggactacaggtgcccactaccatgcccagctattttttattttgtatttttagtagcgatggggtttctccatgttggccaggatggtctgaaactcttgacacttcaggtgatacacctgctttggcctcccaaagtgccgggattataggcatgagccaccgcgcctgactgacctccaatgttttgggagtgtgacacttcgggcattcacccttggctgtacagctcacagagagttctctgccacagggtctaggctagtgcagcaaagtgtgtagcagaaaatccatccttgatgatatatctaattttctgacagcaaattataccagaagatccagtctcagtttctcaccattacattaaagtaacataatgattatcattataatacctatggagcacaaaatttttacctgtgttgctttgatatcattaagttgcactgagggcatttttatccatttcagtggagagtggagagctctccaagaggttcagcctctaggaggtgtcactgcaagggcagcacctatgtttcctgccgaatgttttcaccagaggccctacatggaatccactgtggacaactaaagcccagttagtctggggcaatgggcaagctgcttcataataaaacatcaattggctggatgcctttccatggagattttcaggccagagtcttacgaattataaagaccaatattttgctgtggtgatctaatgacatacaatttaaaagagcttcaagaagtggaaaggactctacatgttcatggtgttaataatcttaacaactattatcacaagtgccctgtagataaatgaacagataatggtcttggaaatacacataaaatataggctgtcaacagaactgatgaagaaaaacaaaccttcacttttgtttctacgtattatgttggttaatatgaaaggaagtgcttatgagtttacaaagcaagctttaaaacctttgtgagatgatactgtatgcttgattcatccaaccacagcatctgcagccttggtaggagtagaacaattacaggaggaatgccaagagagacaaagagccagttttcagcttttgacgtaaaaaaaaaaagggggcccagaagaaggggagctcaaagcccatccataaacaaatagattaaaaagataataaatgatgaactagatattttgctttaaggagaggatccaggctccagactgtctcatctgggaggcagagaggctggggtcacttctttaaggaaggaaaggccaagaggcctcttgaggctgtaagaaccatatgggaggaaaaagaaaatttcagatatggctttgcccctgccccagggaactgagatggagacaggcctaagccagcagattgtccttggccattccaggtgagttagcctctgttttagttttctagggatgccataacaaaataccacagactaggtggcttaaacaacagaaatgtattttcccacagttctggaggctggaagtccaagttcgtggtgtcagcagggttgatttcattctgatgcctctctctttggctagcagatggctgccttctctctgtgtcttcacatggtcttctatgtgcatgagttccttgtatctctcttcttatgaggacaccaatcatattggatcaagacctacccacaggacctcatttaaccttaattatctcttaaaaggccctgtcaccaaacacagtcacattctgaggtgtactggagtttagaacttcagcatgtgaatttgaagagacacaattcagtctataccagcctcattaggtttttgaagggttgtattcaatttctttcactttaacatatggcacggggtcttaccactatcagctgtctgcccactgctggacaactcaccagcagaagggatttcccttgagcttttgctcagtagaagagaactaagttgtgtagaccactttctcttcaatggccaggattcctgaatctccccagatagcctttgatttatgttggccaacatagtatggcagaaatgacatttaacaggttctggcctgtacttcaagaggctgtggaggcttctaccctcttttgcaaccctgttgccactatatgaacaagtctgcattagcctcctggagaatgagaggtggaggccacgtggagccaagatcaccattccagcccagaacccagacatgggaggcagtacagccaagatcagcggaaccaatgcagtagctgactacagacacctgagtaagtccagtagagaccagaagaaccattcagctgaacccagccagaagtgctgacctgcagaatcgggggctaaataagtggcttttgttttaagtcactaagtattggaatagtttgttatacagcaaaagctaacagtacacagggcctaaaagatactctcttaggctcaagtggtagaagcattgtcaaagtcatggaaaggagttatcagagaccaataccatgttcttactagtgataatagtttggagttgggggcaaggggagcagaagtcttgggtttgggcacatcaattttggagaaaggaaggaagtttactctattttcaaatattgcaaatcagtggtttaaaaaaaatttctagaagtggcagcttcttttcaaaagaaatattatacagaaacttcaatgtatgaaatagacacaatttgtaatttattgatataaatctaacatatggtcaaatatataaaattgtttaaaaagttaatcaatgaaaacaagaaggataatacgattattaatgcaaacattcaaaattggatgtaaggggagacaggaataatcttattttagcacccaatcaatttctatatattattttggtagcagagtattgaaaatcctgataaacatctgtaagtagttgcagcaggaaacagcttttaacagctcactttgcaatctcagaatactcctcaattaaacaaagatgagaggagaagccatctgtcagcacagttactggaggcaggatcataatggtgcataacacaattgggtgtaggttttcttaaattatataaaaattaccttaaagtatattttttcaaagtgaaaattcaatcaatcatttgcagaaactgtgaagcacctcccagaagttcatgaagcacacttggaaaattgtctgatatttcattagggtagactttgaagaagaaattcggaagatgtgcaaagcttggaaaacagagttgcaaggaggcctcaggggtcacagactccccctcttcctttcaaaagcaggaactgaggcctggggaagaaaacacttttctcaggacttacacacaggtatcttcgctcccagttgagacctcttttttcaggagaaagagacgtgaacccgtgggagaaagagacatgaacccgtgggagaaagagacatgaacccgtgaaggagctgggtccccatcagtttcttttttatgctctcacaaaaagaccaaagtcgctttaaaagaatgcccaaataaagattcctatttccttgggaggattttaatagttggtataaaaagtctgcacatgtgaatttatgattgaatttgctttctaaaattcttaaaaccttagagcagcagccataggagtcagtgactgtagcagacacaagttgagaaactttctggtaccatgttagtcactaaagcccctccaccaccctgtcagtctgcatttccatcttggttcgggggaactgctcttccccactctgagccacgtgcttctaatgactccgcctccctggcatcagtgattggttggacggtgggaatcagcctccatctgggccaactgtagccctctgaagcctggctgtattcccagacctggcccaatgagcatctttgcccaggatctttctttttggaaatcagagaaaccttctctgtctagtcccaaggctttgggtacatgggccacaggaagggatgaagataagcagatgaactatggaaagagggaatagagacaaagacacagagtccaaggactctgttttgttttgttttgttttgttttgttttgagagggagtctcactctgtggcccaggctggagtgcagtggcgcgatctcggctaactgcaagctccacctcctgggttcacgccattctcctgcctcagcctcccgagtagctgggcgcccgccgccacgcccggttaatttttttgtatttttagtagagacggggtttcaccgtgttagccaggatggtctcaatctcttgacctcgtgatccgcccgcctcggcctcccaaagtgttgggattacaggcgtgagccaccgcacccggccccaaggactctttttaatgctgtgagggcagttccttctgcccttactgaggtttggttactgagtctaaaacttccttttcttcctacagtgagtttgaattgggtttctgtcacatgaaaccgcagaatcctgatgaatgtggggaatacttaaaaaatataatgacttatttgctagtgatagagacaggagacagctaagggtccctggcgaaaccccaccttcaagcctaaaacagcctgaaggctgaacaaccggactgctggtcccagatgaagccctccctttcccagctgatcctttcttaatcacgccgacctgcgcctgcgcactgggaggatgggggtggagcctcgggaaggtcaccccgtttgcgtggggaggagcctggcctctcctgttcctgtgtggtgacctgggattcagtctgtgaggcgggaaatttgctagcaggactctctcttgctctgctgagaggtatctttcttttttcctttttgcccagtaaattccgttttcctcacccttctatgtgtccgtgaacctaatctttcctggtggtgtgaaaagagcccagttttagctgaactaaggagaaagttctgcaacagtaagaaaatgaacatatgcactggatgcagattttgcatgaaacttaagggaaaaatggacctcaccaactggactcagtgggatccaatgaccccaattacaaaacttctgcaatgaaactctggttaacaaggggctggatttgattatggaattgaggttggtcaatctaacttttctcctatctgagtgctcagggctgcatggaatgtgaaaataagcagctactggttgtgcataattctgagctatgagttaactatgaatggggttaaaaaaaagtacgtgagccagctgtggaggcagatagacatactttccctatgggatttatgagtattcagccactgaagaaaatcagaattataaaaaaattccgtttcaactggtgaaactgagaccctgtaaggacacttgaattggccaggagagacaatctgtccctccgtatatattccattttggttggtatcatcaaaaagatttacctacaacctgtggagctcaacctaggtgttgacgattgaaggtaaatttgcaatctgagagctgcgcttcacttgccagggctgaacagcgctgtttttcttcagtggacatctttcctatcccatcaacctctcccaagcttttaaaaatctcatctctttccacaccaccttgtttttcatgatccagcttctcagtccatgtaccctgtgccaacacttcttaaatttcttttttactttccgtattttgctgaattttattacaggctcttggcttcttaggaacagtactcctctactatgctgtgttccctggggcctcttaaatttattatctggcttattgctagtgaattcaataaaacaggcttttccctgggacttgactttgcctcttgctcaagcccgagtctactggctgcccccagtgcttggtctccaaagccaggctacagggattgaaagtcagggatgctgccatctccatagcacttcaaactcagttctgtcctgatttcacatttcaactataggatgttctgccaagtgacagggcacaaaaagagctaagcctcttttctgtactgtggttttcattaagtgcatatgtgtgtgcctgcctataataacaggtaagaacttatgtctagtaacttctgttctgctacagctgcagctggttagaatgttatccctacttggcttttggccatatgcaagcctacttcagcagaatccgcaggctctcatcagcctctagcttaatgaataattacaaaaaatacaggtcagcacctgccaagggggcagagcagggatagctttggctaaatcaaggtctctgtatttcccatttttctttaatgcaagacttcttggctgctcttcctcagaaagcacaggaagctgaagaaattccctcttttcttggcaaatgatgctttctcaactttccttcatggctttttttgacattgattttatttaggctactgcaataagaagagcactccacatccaaatttcagaatgtctcagcagggtggttttgctctagacttctacagggaggagtagacaagtgggatgattttacagttggaattgtttttgttcaaggctattttcaaagaagataacaggccattgactaacagcccccaaatcctggtgtcatctgtttccaatgatttgttccacagatatttactctggctctgcaacagctatattagagcgaccagggcaagctgggggcttttcatgccaagggcaagtgaccattccttctcacatgaagctccagacagcttccatgaagttacagctggacatagtggaaaatcaaaaaattatatggtacatatggagaggatgtatatagtcagggagggaccacagtggggagaggtattcagaaaagccttcccaaaggaggaaaagctgggacatctgggcatcaaaggacatagggtggtggagctggtggttaagagcatggattctgaagccagaccctttgggtataaaccctgcctgtggttttctagctgcctgactttgggcaggttatataactttctcgtttccagtttcctctataaaatgaagtaaagagcagtactggccgggcgcggtggctcacgcctgtaatcccagcactttgggaggccgaggcgggcggatcacgaggtcaggagatcgagaccatggtgaaacgccgtctctactaaaaatacaaaaagttagctgggcgtagtggcgggcgcctgtagtcccagctactcgggaggctgaggcaggagaatggcgtgaacccgggaggcggagcttgcagtgagccgagatcgcgccactgcactccagcctgggcgacagagcgagactccgtctcaaaaaaaaaaaaacaaaacagtattgtatttgtcttctattgctgtataacagagtaccacaaacctagtaacttaaaacaacactcattaattagctcacagttttgtaggtcagatgtccagcttggtgtggctgtatgctttgcacagggacttagctgaatttaaggtggtgtctaggttgatttctcatctggaggttctggggaaaaaaatctgcttccaagctcattcttggtggtggcagaattcttttccttgtggcagtaggactgtagtccctgtttccttgctggctgtcagctggggctaatcttagcctaaagattgctcctatcccttgccacatggcccctccatcttcaatcagcaatggctcatcaaatccttattctgctttgaatctcacttcctctcctgtgatcagcccaagaaaactctctgctttaaatcattcatggattaggtcacgctaaccagataatctccatatcccaagggtaactggtacggggccttaattacatctgtaaaatccctttatagcagtacccatattagcagtgggctgaacaactaggagaggtgtgtatgccagggctggaaatcttggaaggctgtcttggaattccatctaccacatgcacctatttctacagaggttatgaggcttaaaataagtgtatgtaatgtgcctggcacataacaagcatgttttaggtaggagcatttgcatgcaaaaaattagccacttgggttctcaggattgatgagaacttggttgtggtgaaagaagagtgttgttaggaacaatggaacagcctctggttctcagctgaagggcttcattttgatctatttggaagcaggaagtgcctgtctttcttggatgaatgacactgatgctctccctgatttaggtttttgctgtggcaacagcagtgaggacaggctttggaatgagggagaaaaaacctgataatggccgtctggaccagccctctcagaaaccatctgcttgaagcttttgattctgagaggagtggagaggtttcctccaactacaagttcagggatttggaaaccactaaaataatatcttttccaaaactagtccagcaaggctctaattgggagaaatgggaaatggaagtcaggctccccactctctctgctaaccacacacgggccgtggttgaggtccatttccaaatcacaggaggccacttcctgtcttagcttagcattgttggcgggagaatctaacaaggggccaaggccctgttgactctgggagagaagcaaatggccaccatccatgagtaagaacctggactttcatccagcctgcgggttgaattgcctgctcacaagaaatctaggttcagagcgttctagggcaggcacaaaataagcaggacagagataaaaagatgggagtgagaatggagagattgtatttttccttccacagatgccatgggggagctggggcagggaggagcttatcttccccaagctcctagacgaggcaattcttatttctagctgaattccttttcatctctcctgacttcttctccacccttctcctctatctgccttggcttctggatcttctcaaagcatcccccagaaaaacttcagccaacttactccctttgaccaactgtcatttttgaaaagctgcccagtctctttgcggtgattttcaaagagagacccaggactaggttttctttcagtgacagcaataggtaggaggaggggtgaagaagacaggagtttctgatgtgggaaaccacacacacacacacacacacccctaagaaatgctgaatctgtaattgcaagacaatataaccttcctgacatctgaggaagatgtcaagaaagaaaagcaaaaactcatatttgtgttatagctgctggggtttctacattagggagagctgaccctgtttgaccttgcctgtcgagaccagagggttacagagagactgaccaaagatatgtggccaaaaggccaatcatatgtgggcaaaactggccaagctgatcagtttgacacgtcaaaagacagatgttgtctgacttgggcagcttgtgggccagagaagaaatccaaagctcagtatctaagaatgcaaaggcgagcaacagtgtgaaccatcacctgtgctccaggtaaagcctgcctgccctgcgtcatcacttattcaagcaaaggactaagagcagcacaattctggcttgttagtgtatggcctgaaagtgaagacttcatttcccttcttccctgtgcactttcctcgtcactgttcaatacaggtgccaaatgtgtcatcatgcttgatggagcctggcgttggctggctggctgtgatcagcagctgaccacctgacagaaacactttccctaattacatttttaacttggattgtgccacacttagttacatttttggggggaaaagaaaggaagggagggaagaacagtgagtgaaggaggtttgcagaaagcttcagggccagatagcacacagacagcccaccttaaaaatcaacacatcttcccatttgtaacttaactacatgtctaaatgttgacatccagtgaacaaatattaattaaaaacccaagacattcaaaactgcacaaatgtcatcttccattgtgtgaaatcaaaaaggaacgtgtgggtgagtggggaggtggggagacacaccataacctacctcttattggtaatgagcttgaattgtggaaggatactttctgacttcataccatttcttattagtatgatggtcaaaattacaaaaaaaaaaaaaaatcactcagactaatggtctcttgtgggcaagtggcgaagaacactgatttggcttattttattctctgtacttctcctggtgtggtggacagtttgctgatacaattattttggataggacttcatgttaggtattggcatggaggcatccacattttttttttttgagatggaatctcactgtgttgcccaggctggagtagagtggcacgatctctgctgactgcaacttccacctcctgggttcaagtgattcttctgccgcagcctcctgagtagctgggattacaggtgcccaccaccatgcccaactaatttttgtatttttaatagagatgggatttcaccatgttgaccagtttggtcttgaacgcctgacctcaggtgatctgcctgcctcagcctcccaaagtgctgggattaccagtgtgagccactgtgcctggccctcatatgtttataaatcactagattttaaatattggcagggctacaaacaaggagagcttgtctgtgaagagaaaaacaattagcaaggtccttcattgtttcttcctctgctgtccattctatttatttgtctgctgctaggatctaggggtgtcctcgaccctgcacataatggcaggccccctgtcttcatcagcactgctacatcctcatatttggcagggagcactctcatttaaggtaatgagtgactccctttcacaatagaactctgagtgtggctcaaattcaccctggctaatgaatcttctgtatggttttttttttttttttttctgaggcaaggtttcactgtcacctaagctggagtgcagtggcacagtcatggctcactgcagcctcaaccttctgggctcaagcaatccttctgtctcagtccctcaagtgactaggactacaggtatgtgtcaccactggctattttttttgtttgttttttgagacgacatcttactatgttgcccaagctcatcttgaactcctgggctcaagtgatcctccctctgcctctgcctcccaaaatgttgcgattacaggtgtgagccaccctgcccggccttgtgtttcatttttaaccctgatataagtaacaacacatctgcttattaatatgttcatgttaacatttactatccagtttgggtggaaggagagtgttctctgcctctgaggtccagttttaacatttataagtgcagcgggtcctcctgttgtggcccacaaaccttacttgggaaaatgtcacatttgagcaaccacacaaaactactctgtgatctctgaatatagtaaggtcaccagcccccacttgatcttctgttaaatgaccaagatcatttctggtcagaaagtatgtgtgtttttgcgagttttttttgtctttgttgacacataatggtgtagaaatcaagcttaaaactgattgtagaacagtttggtgagaaagatttttgcttttctgccataatattcccctggactttgcttcgggtccaaagtaacaccgggaagtttaagaccacagaaatgtgactaaatgaatgctgatcacatttacaaaagcaagtgactttgtccaaagtctctcattctcagatccatagtagacatatagatactttttctaagggcaaaatttcctggttcactaagccagacttccatgttattgacgaaataaagataatattgaaaatgacagtgtctgagaagcaatctcaaactgccttttattactgcacacagttaacgtggaattgagaatcactttctttctaacataaaatgtgagccgtagagttactactgaaattcaccacagtgattcagccaacaactcaacttattcctttgcaaaaatttctgaaggtttttttttctcccttcaatctcagcattacaaaataatgagcaaacagttaaattggcccagctctgagtttcaagagagatttatggtctgctcatcctctggagggaccataaaaccaccgatgacatcttactttgaaatctcttgtattaagtaaagagatgggtgtggtgcgatagtgaactctgcatgtgagtggtatttagacaagttctgtacttcaaaacagagtccttaactcatacgaaggcttcctgccactagcaagggatctcagtaatgagcgtgctgccttccctaacacccccatccttttccagaaagattcttaattttatcctaaatatatttgatattttttcctctgtattttgctttgggtttaaaaaattccctgaaagatttttttctcgtctgtggaagcatcaagccgcagatccaagtcagtccaaatcaccaggatcatacaagacgataaaagtgccttcaagttctaatacttgctggatgggcccaagccgcgttttaaatgtgaacaatggggtggctgcggcagagaactgaccatttacttcctgcctcagatgacccccttgtgatctctgaaactgggcagaggaataaggaaagggaaagaactgggttttggggagaaacatgctttctggaaggcgcccaggtttacccaaagagcacagttaagtgctgaatttcaactagctctggagtcaccctgtttggggcctcattctggaaacccgaagtccagcggcagctttcctccacatcaggacagagagtggggtttgggagcggacgagggagcgggagtggacgagggagcaggagtggggctcaacgacgacccaggcgctcaaggggaaggggctgagagcgtttcttcgctgtgcggctgcaatagaaactttttcctcgtactatctgactccgggactggactgtgaggtctgcaacagctggtggggttcgggtggggaacacactctaagcccagcgccagggctggagccgtgggtggagccgctgcagccctgggccgggggcgtcaggaaactcgagactggggcgcggggaggccccggccagagcgcccgctctcccgcgtcccgggcggggtcctcacctgttccagcgggccaccttcctccggtaataccgcagcgcctcctggctggccaggagcgagtcctcggctcccaggagaggcggctcctccgggacgttgtacagcgggtgggcgaagagggcctgcaacttggagctcgacccgctgtggctgccgccagccggttcagtccggggctcggttcgggaaaagttgtgcacgatcgtgccggggtccgaggcagctgcggccgagtcccgcgccagggaggaggcgcggccggtgcacgggcacccccgcgggcgctcccgaggccgcagctggcgctgtacttggggccagaggtggaagtagaggtcggcggagagcagcgcgcccagcagcagcagagtcagtaggcggtcccggcgcagccccggcatggcgtgctggccaagggggacgccgggggcaggccggctgtctccggggtcccgggaggggtcgcggggtgcgggcagaagaggtgcctggagtcccgcgggtgggccggggtcagtgagaccggaatgctccccgcgcgggctagtcccctgtggaggggtgtcgctcctcaacttggggaccaggtgcacggagcaccggggctctcggagtcagcgggcgtcgcttctccgcgccgagtgagccgagggaatggggttcccggggtgcccgcttcttgcgccttttctcccgtgcgcccgcccgcccggacgctcgcggcaggtgaagggccccggggcgccggcgccggctgccaccgcgggcggacgggcgacggggcggggggcgaccgcggagggcggacggaggccgccggctgcaaagcccggggcgtctctcctgaggatgctgtcgctcggcggcggctgctagtgctcccgcgactcctcctgcgggcggcggagacgccagtgccggcggctggcacgggcggcgcgagtggggagttggcgaagcaggagcggctccggggagcttgtctgtgcgcctggactcctagaggcagaggtagcgcggggcctccccgagcctggcctggcgccggcacccccacccactctccgctggcacctgcctctggcgcagctgacggccaactcccgatccgaagccggcgctgcccttgcaccttgtcacccacccactgcctgcgccctccccctcgctcgggcctcccactttccctgcccaggtctcaatccagtcactttaagggactcacgcgaggggtccgaagcctctttttaccatttctattatttttagggaaaaaaaaaccaccacaagccccctaaaaccctttttttcctgtaagctttgccaaatgagtgtgtgggggggggtggggggaggcgggggtggcagtgttggtatctgttctttctttgtgttcccttccacctccgcccccctgcagagcgcagggcacatcaagattcataacaactacctaccacatgcctggcacatagtaggtgctcaggaaacacgctcttggtgaaggaaagagcttgacctttaaaagtaaggtatcagttttacctagaatcttgctgatttcctgtttggaaggagtttgattccaactctgcctgtactttaaaaagaggaaatgtttcttgcactcagggagggaggggccctgatgaccccactccgaacttttgagtttagcttggtgtgaaagtagtccacccaaatgaatcactggaggacacatttaggctttctccaatattctgtgaggtaatgtaccctccccacacccagttttccttttgaagaagagggagggagtcctgaactcctggctcctctatttaatgaccccatagtatagtaaagtgaagtctgattggagaggcggccccaccctgctgaatttcaggaaatccaccagaagctgcttgcccaggcagcaaagcttcccatgtaagttagttctactctttaaccccctcccttcccttgctggaattgagaaccctcagacatactttgacttgtgggttcagaccagagttcttttccccgtggttcagtgtaagatttcttcgggactttgcagtctcctcaaatgtaaatgaagataatgatggaacctacctcctaaggttattatgagacttaaatgaattgaagtacaattatgtgtcacgtctgagaaatgcatccttaggcaattttcctgtgtgtgtgaacatcagggtgtacttacacaaacctagatggttcagcctactacacacggaggctacatggcatagcctgttgatcctaggtacaaacctgtacagcatgcgactactgaatgctgtagggagttgtaacacagtggtgagtacttgtgtgtctaaacataggaaacatacagtaaaaatacagtattgtaatcttatgggaccactgttgcattgactaaaatgttatgtggcacttgactatgtataaattacttagaagagctcctaactcatcctaaataagtgtgaaatatgtgtttgctatcattatgattacttattagttcctgtagtacactaggcttggttagagactgctcatcgctaggacaaaaatagaaaaggatggaaaaggaagatagcaggaaggaacctgctttcaggggcataacattgtggcctgagtgcccagtccaagtgaaaaagcccaagacggtactattcccagctactccactcctctgggtatgatggtgggcattttgaggggttctagaacctcctcctttttatctggaattaaattttaactgatttccaatttctgagagacgttgcaacttctaatgtgtttaattagatgtcatggcaagcgaatgaagaagtcaggcattgaatggtggtgatgtaactgcagtaactgtgtggcaaactgatgcgcatttttctcggctggcaaaggacgtggatgtggtgacactgcaggtcttgtgacttcaattctcctcaacccatggggtcatactcgcttagtagactcttttttttctggccccaatttagggaacaatagtgtaacttgcttggaaattatgtaaacatattttccatgccctttaaaggtcacagtcaagtgcagaactgcatgtgggagttagatattaagtgtgaatgaagctggataggagagtggaaatcctaccagtaggattggccaataggatgttggcttcctcaggtttgcctctaatctacctttacccctcctagaaatgagccttctcctgctcctccgatcttccatgtcttgggccctggcttacttgccagcctcacatacatcctctccgttcacactgaaggtatcctaaattgctgtttgctgggacccatcattctgtttaaaatctttcattggaagcccctccctccttttccatctctactgatcttgatgtatctagagcctcataatctcttgctcatacttgcaaataggcttctaactggtccctctgcttccatggtaccttagttcagtgcccacacacactcttgccagagtgagacttctagtatgcagaggcaaccaggatattctcctcctgaaaaccccctgagcttctccttgttgctggattaggtcactcattgtgacacagctcttcgtggtctggcttctacctcctttcttctttatatgccccctctttcgtcttcaccccacaagactttctgcaattcccaagtgctccaaccttgtaggggtgggttgcccctccacacctgtgggtgtttctcataaggtggaacgagagacttaggaaagaaaaagacacagagacaaagtatagagaaagaaataaggggacccggggaaccagcattcagcatatggaggatccccccagcctctgagttcccttagtatttattgatcatttgtgggtgtttctcgaagagggggatgtgtcagggtcacaagacaattgtggggagagggtcagcagacaaacacgttaacaaaggtctttgcatcatagacaatgtaaaggattaagtgctgtgcttttagatatgcatacacataaacatctcaatgctttacaaagcagtattgctgcctgcaggtcccacctccagccctaaggcggtttttccctatctcagtagatggagcatacaatcgggttttataccgagacattccattgcccagggacaggcaggagacagatgccttcctcttgtctcaactgcaagagacattccttcctcttttactaatcctcctcagcacagaccctttacgggtgtcgggctgggggacggtcaggtctttcccttcccacgaggccatatttcagactctcacatggggagaaaccttggacaatacctggctttcctaggcagaggtccctgcggccttccgcagtttttgtgtccctgggtacttgagattaggaagtggtgatgactcttaaggagcatgctgccttcaagcatctgtttaacaaaccacatcttgcaccgcccttaatccattcaactctgagttgacacagcacatgtttcagagagcacggggttgggggtaaggtcacagaatctcaaggcagaagaatttttcttagtacataacaaaatggagtctcctatgtctacttctttctacacagacacagtaacaatctgatctctcttgcttttccccacacaacctctcacagatgtgtctttaaccgaaagctctttctcctttccccacctggaaaacacccattagtccacccaagctttggccacttgtccaatttttctctgatgcttgtcttcatacccattaaactcagtgccttgtgctctcatgtgcccccacagctcctcatatgttcccctattacaacgttggccatgttgggtttcctttttagtatgtgttatgggttgactatatcctgctctcaaattcacttgttgaaatcctaacctccaatacttcaggacgttaccttatttggaaatagggttgttgtagaaataattagttaagctgatagcgtactagtgtagagtggacccttaatgcaatatgacttgtgtccttataaaaaggagaaattgggacacagagacatgcatacagggagaatgccctatgaagataaaagacagattgggcaattcttctataagccaaggaataccaaagactgccagcaaacacaagaagctaggtaagaggcatggaacaaatttgtccctcacagccctcagaagagtccaactctactgacaccttgaccttggatttataattctagaactgtgagacaataaatttctgttgcttaagccacccagcttgtggcactttgttacagcagccattgcaaatttacacagtacacatgtctgccatcttcactggagcactactcctgagtgtagagggagaatgctacttatatatgtacacagagctctgaggatggggcctatcatttgagaaatgctcaagaaatgtttgctgagtgaaggcagagatattggccatctctacaactgtagaatctcgcatatggcctagtatacagtaggggctaaattattgtttacaataagatgacatagctttggaccctgtaggagacataaagaaatatatgacacaattccttcctgccttcaagagtcttgtgatcatcagagagtccagctatacctgtactcacaagccaatgggaaaaaagtatgaggtagtacacagagcagattagcaatctgtgccattgcatgcattaagaggagcaaatgcaaagggcagttgtgtttcctttcagtctagctaaatatcaagctctctacttgcaggagttaaatcatgaaaacaatagagtcaacatttaaacaccaagttcctctatctgtgaaggttagactctatttttatcttgcccatgttcccgtgttgcttagaacttgactagttgttttttgtttgtgtaggcagttttctatactagactataactccatgagttcaagggtaacatgttttcttttttattttcctgtcttcataggatcttagacacagcaaggcatgcaaatgagaattaacaaattcctgcagaataaatgatgtttgtgggtttatgtgtgttcatacatggaggtgggaagtggtttggaaaagagcacttaaaataagaacataaatgtatataatctagctcaagataagtgttaagttagaacatctacataagtgttaagttaaacatccgttatggttttttttttctttagacagggtttttctctgtcatccaggctggtgtgcagggtggcagagtgtgatctggctcatggcagccttgaactcctgacctcaagtgatcctcccacctgtcagcctcctgagtagctgggactacaggctcatgccatcaggcctggctaatttttttttttttggtagagatgggatttcaccatgttgctcaggctggtttccaactcctgagctcaagctatctgcctgtttcagcctcccaaagtgttgggattacagacatgagccactgtgcctggccccagtagatgtttacttagaacatcaatggaaattgccttgatcctattgaaaaaccaataagtaagagacacataaagaaataactaaatgtagacatctatgtccctcacagtttttattatagtatagatgcatgtgaggaatgttacctttacctgctagctgtctcagtaatcagcaagagatgcaattgaaattactataaatggaagacctagaatggagtgaacttaagaaactgaaactgatttagtattgcactcaacaccttattctgaggtagaaagtccaaaattttctaatcgtgaccaacacataatgcctcagcataagccagagatttctcaaagtgcagcctgtggatcagaagtacctgatgtgcttataaaaatgcaaattccagggccacaccatagttctagtattttttggaggtggggccaggaatgtacattttcaataagctgattcttaccagcttataagattctgacacacattgaagtttgggaatcactggttgaaaggacagtgctaatgagagcaaagtcacagatttgattccaaataggctaggtaggatccattgtctaacattggccatccaacttgtgtcataaggttctaaggcgctaaagagagagagacagagagtacgtgtttccccatcattgctactggggaacacaaataaacaaataagtgcctgttctttacaaatgatgggtatgtagtgtgatcttgctataaaaagtcatggctgtacttattggtaaatttcccctgggaaactgaactaccttccctggatctcagttgcctcatttgaaacatgaaacgctgaagtgaatgatctttaatgtccttttcagctctaaagaatgagaattttacttttttttctactaagcatatattaatctagaccttttcacacaactttatttccagtataaaccaaatacttgagaaagcaaaccaaggcattttgtaggaagagtaagagcactggattgggagttagggagcttacactgtaatcttggctcagtcattaactagtttggtggcatgggacaaattaattaatgtctctgggcttcctttgcctcacgtgtaaataactattttgtggtagacaatttcaaagttctcttccagcattgagttccttcaggagtgaaaatgaggtaaagacattcttagatgaaagaaaactaaaagaaacaatcaccagcagacctgctctaacaaaaatgctaaagaaagatttcagatggaaggcaactgccaccagagggaaacctggaacatcaggaatgaaggaagggcaacagaaatggtgaaaatattggtagatataacagattattttttctcatcttaagttttacaaaatatacctaataattgaagacaaaaattatagcattatctgatagagattcagtatacagagacgtaatacgtatgaccactacaatacgaagggaagagggtaaagggacttgtttgttggtaagaactctgcattccacttgaagtggtaaaatattaattccaaatagctgagaaacattaagtatatatgttataattcctagattataatactatactgtactaagagatataataaaattaaaaactatactgagagacataataaaaataataaatatattaaaatgaaacactaaaattacccaaatcatacaaaagaaagcagaaaaggggaaagaagaacaaaaatataggaaataaacagaaaacaaattataaaatggtagccctaaatgcaaacatactgataattatattaaatataaatggcctagacacaccaattaaaagacagagattttcagaatgaattaaaaaacaactcaatgttatgctgcctacaagaaacccggtgtatatatgaccactggtaacttaaaaggatagaaaatgacatatcaggcaaacactaattaaaaagaatctggcataattatattagtattactcaaagtagcaatcaaaaagacaatataccaagaagtcataataattctaaatgtgtatgcctctaacaatacagcttcaaagtacatgaagtaaaactgataaaactgaaaggataaatgggaaaattcaacagttatagctaaagactttagtgtttctttttctgccactcacagagcaagtagacagaatatcagcaaggatatagaagaactgaaaaatactattggccaactaaatctaatttaacattcataggacacttcactcaaaagcagcctaatacacattatttttaagtgtacatgacatttaccaagatggactatatcctccattataaaacaagcatttaaatttaatataatcaaatcttacaaactgtgctctctgctcataatagaaatagactggaaataaatgacagagagatatctggtaaatctccaaacatctgaaaacataaacatgtacttaccacatgacccagtaatccactgctaggtatttactcaaatgaattgaaaacttatgtgtgcataaaaacctacttatgaaagttttatagcagctttattaataattgccaacattaagtagtgcatatgtccttcagtgggcaaatagataaactgttgtacatcatacaatggaatactacttagaaacaacaaagaacaaaatatgggtatacatgacagcattgatgcatctcaaaggcattatgctgagtgatagaatccagtctcaaaaggttacatattgtatgattacatttatatgatagcctagaaatggaaaagctatggtgacagagaatagatcattggctgccaggcattagggaccgtgatgaaggtatgactacaaaggtacagcattaggaagttgttttgggtgatggaactattctatatccttatcatgatggtggtcatgtgaatccatccatgtgttaaaactgacagaactgtacattaaaaaaagggcaactttattggccctattgttcaattatgttaaaacaaaataaaataaaataaaaaacaaaggttgcatacctccatccaaaagaattttgcctgtagcctggctcataatagcaaataattgcacaaaaaagtaaacatccatctatagggaaatatgttaataaattgtggtattattatgtaatgagcagttaaaatgaaggaagtacaactgtattttctcagcaaagatacatctttaagttgtaagaaaacatgaatatggggtgtgtgtgtgtgtgtgtgtgtgtagcagtatgatactatttagataaccttcaaaactggcaaactaggccaggcacagtggcttacacctattactccagcactatgggaggccaaggagagaggatcacttgaggccaggagtttgagaccagcctgggcaacataataggacccctctctacaaaaaattttaaaaattagtcaggtgcaatggtgttcatctgtagtcctagctacatgggaggttgaggcaggaggatatcttgagcccaggagtttgaagttatagtgagctatgatcatgcaactgcactccagtgcctggagaccctgtctctgaaaaagaaacaaacaaaaaattggtaaaattataaaaacatgcatgagaataatgaatactgtcttagtcagtctgctgctataacaaatataccatagattgggtggcttaaataaaagaaatttatttttcacagtactggagactggtaattccaacatcaaggtgctggcagatccagtgtctgatggggacactcttcctggtttgcagatagcccttttttcattgtatcctcacacactgaagaaagagtgagcattggtcctttcatcccctaataagggcactaatcccatttatgagggccccatcctcatactctaattaccccttgatatgatttggatgtttgacccctccaaatcttgtgttgaaattttatccccattgttggaagtggggcctaatgggaggtgtttgtgtaatgggagcatatccttcatgaatatattaatgtctgggagggtaaggaagactgttctcattctattagtttccgggagagctggttgttaaaaaagagcctggcatctccctcccctctctcttttgcttcctctctatggccatgtaatctctgtacacactggctccttttcaccttctgccatgagtggaagcaacctgaagccctcaccagaagcagatgttggtgccatacttcttgtatagtctgcagaactgtgagccaaataaacttcttttctttataaaccacccagcctcaagtatttctttatagcaacactaaaatactgagacacctcccaaagaccccaccccttaataccatcaaattggggatttaacatatgaatttgaggagaacacagatattcagttcttagcaaacaccaaattcagcacagtgattacatatggaattaaagtgagaaaaaagtgcttgttgaagattatacatggggcttcagcagtaactgaaatgatttcttagaaaaaagatctgaagcatatattacaaaatgttaaaatttgacaaagttgggtagtgctatatggatgttggtcacattattctctatcacgttatgactcattctctttacttttcatatttacaatatttattaaaaatctgacttgattcattttgtgacctcatatcctggactattctaggtttttaaagagaccattgaaagaaagcgttgggctttgacattaaggtgaagcaggttaataagcagcagcagtcaaagaaatttgctctattttattttaaaggaaatacatggtagagggcaaggaatatgtgtaagagcaatttcaacttaaattaactgagtttatattttaaaaggggaagaaattcacagattttatgcgtggctgctttcagactgtgcaattcatctgaacagaactcttgcatatattatgtgagctttacatgccagactgaacaacaacagatgtgttttccctgtttcagtttttactaccttgacagtacagctattcttagaaggtgggaagctgggacttcttgggtctttagaatgtcatgtcttaaagtatcataactgttttctagcaactcctaatccactgtatgaattcacagctagtgggtgagacaaacattaaacaaatgtaacacaaataaatatcttggtctggctcaaagttcagtgtcagaacgtcaatacagctaaaataaatagaaatgactccaaaaagctttgaaaattaacataggtcttcactcagtaatttttgagggaatggaaaaggagaattacattatggaggtatacaattgttagtattcctttctaaacatccacaatacatgtctctctccacaaagttcaggctttgtaatctccttttcctttttaccctctcaccccaattcccataaactcctccccacctatgcctgttctcttctctttatttcatcccacttcagtcctttcatacatagggcaatagtctccattcttaatggcttctgtctccctctccattcccaatgcagttcagcctgatggaggtctattagctggctgcgtaattaaaggactcttctgtcttggaaggagaatttcaaatatttatatttttatgatattttagttctgacaaatgaagaatcataaaattataagttacagtggggacagatacaatgacatcatcttaactctcttcgtgctgcttttgttttttaaatttggaagcaaggatgaaaggtgtaaaagatgattaatcattttggaaatagatgcatgactacagcctaagtctgtggtgaaccaatcatgctctcttcctttctctgcgttagactaagtcctacatttcacaaccttccacagtgttcacttgataactaggaaaaggcaaatggaccccatggcttctacactctccctctgttctttcacagatgtatgctggccatattttatgaactggaaatctggacttagggtcaaactcatgaaacagggtattaaaaatcataagtcatctatcccagaagagtcaggaactatagttgccataactaggcacatatgctaagccctcacttccctttgatgttctagatgcagccttagagggagaagtcagtggacacaactggagcccatggtatcaggtctggacaaaccagtttcaaagctgagtgctcagttttgcaaaggaaggcagtaactctgactagcagcagtagaatctaggcagacagaggactcagtagcaccatatcttcatgatgtatttatttttaattctacaaataatatatgaatattctctctttttaaaatatttggacaatagacaaaattttatagtaataagtgaaagtctcccttccttcttcctcttccctatctgattttcttccccacaggtaaccattgttggtttgatatgactccttccaatgctacatatactcaggtagctttgcctctaccttaatagtaatcagataaatgcaaattaaaacaattgacaatagatcatttgtttcttatcacattttcattgcaaaaaaaaaaaaaaacaacaacaaaatatccagaattgactaggacttggggaaggaattgtaaattgaagaaactgttctggaggttaatttggtaatgtaaatgcctacagactttatatcagtcaggatccagttaggagatgaaaagcataccaattatttgaaaaggaaaaatttaataaaaagaattattaactagtaaaagtgataagacacctacctgtaaaagggatctagaagtagcagctgcaaaaattaaaaaaagaagctgctacatctaagctgaggaaaagtggatctaaggactaggagggttcccctacccttaagccaaggctgaagtttagacctcgttatagagagcatgtttaccactggaaaaaaacagccactgttggtgaagaaactttctggatagcaggccatgttgatctgtcaaagagcccatgggaggggctaccgatgcctgaggccatggtcagagctactgtggaaacaaccacagagtggtggtggtggggagtgcgacttgatagtgtggttggagctagttggtgaaggctgcagggctcccatgctgaagtaaaattgaggactgggacccagagaagtgtcttcctgccactactgccttgcagagttcctccagcgccctctattgacaaagcctattattgtgacaactggtaaaggaggaatgtctagagggtccagctccagtttcataaagcccaacagagaaaggtaggtttggaactgagaggcaacaaattcgtaactggtacagactttgacttctgaattccatttataaaaatttgaggaaatcattaaagttgtatgtaaatatttagataaaaaatggttattacagtatagaaaaaaatggaaataagtgtaatgtttgaaaattgaaaactgagcaaaataatggtttatctataagattaagctgtatttatttattttcataaaaagatgtttatatcactagatggaaaaggtgtgttaataacaatcatatcattacccattaaaaacatacttatatatatatttctatgtatgcatagattaaaactttgagaagtttggtgtctttcttttttttttttttttttgagatggagtctcactctgttgttcaggctggagtgcaatggtgtgatctcggttcactgcaagctccgcctcccaggttcatgccattctcctgcctcagactcccgagtagctgggactacaggcgcctgccaccatgcttagctttttttttttttttttttttagtagcaatgggttttcaccatgttagccaggatggtcacaatctcctgaccttgtgattcacatgcctcagccttccaaagtgctgggattacaggtgtgagccaccacgcccagcctgtttggtgtgttatacaccagctccttggtataatatctgagttacaatcgttcaataaatatttactgaataaatatattagcttcctcaggctactgtaacaaattgctataaagttgccacaagcaacagacacgtgctcttccgtaattctggatgccaggagtctgaaatcagaacacttgccattacatatagggcctacaagataatccagacttgtctcattttgagatccttaacataattacatttgtctttgcaaagacccttttcccaaataaggttacatttacaagttttgggtggatgtatcttttggaaggtgaggtgagggatgagtaccactcaacccattgcatgcataaataaatatatagcaacattttacattggtttctttgggtggtgggatttatgaataatctgaattttctttttccttttttttacttactagtattttatgatttttatgcaaagatctttacactactttagaaataaaaggaaagtaaaaatgtacttggcatatgaaaactgagagactacattcaaaaatgctgatttgatcatcttgaagttatgattgaacccatggttcacaaactccaagtagttgtgtgcactacagagaaggaaacagtaagagaaaataaagagcctcaggaggagggcaaagtcatcacacagaaacctaagttaatttatgttctatgggtaagctacagacctcccagccgaaagctgacacacggaagctgataaccagaaatccacgcttagccttctgggcatctctgaattgagcaaacttgtggtctgcataacacttgccatttaggacagcagtttggaatcttcctgcactccggacctcctcttccccttcctttttgtgttacgattcattgatgaattcttagaaggtgctgctccattaaaataggaaggtctgtgacgtcaaaagatctgaggataaaaggcattttaaaaggctgtcatctttcttttatttagagaggcaatcttttcaaaaggaaagacagaaaaacattggaattagggcatactcatctttttatttctcttaaagcagtagatattttatttccagtctcttctggggactagctttttttaaaatttatttatttatttatttatttattccaaaacctgaagtttaaacctctatcttaaaacatggccgaatatcaagtgttggagtcaagattctaatgtcatccgagaaaaaacacaaatgtcatctgggcagaagataatttaaaaaatagattaattaaaaataataaccacctattaatcaaagaaaaaggtcatgtattatgatctttaaaaagagttatctgatttcagattgacatctgttaactctgaggttaacatgttaaaatgtcagtgaaatgagtggataaatacctgaaatataaaagtacatgataatttttaaactagaacaggggttggcaaatcttttctgttagggggcagatagtaaatattctaggttttgtaggccaaatggtttctgttgcagtgactcaactctgctcttgtactacaaaagcagccatagagagtatttaaactaatgggcaggaatgtgtgccaataaaactttatttaaaaaacagatgagaggtcagatttagcttatgggtggtagtttgctgacctccaaagagaacatcagaggttttcaatagtacaccaataatagtggctctctgaaattgaggaaagcagatttttatctgctttgttgcttttcttataagaaggaaatgccaacatatttgcaggtattcatactttgtttgggagattaatttgtgctaagtgatgattgacataaaaggaaggaagagaaaatgaacctttgtgaaataaatggttggattctcagaaacaaggaccttttcaatgaattctattgacaatactcttggccattatgttctgggaacatatttaatacctgccttagaaattaatcttgttatattgagcttttaccatatggagttatgtgttgaatgattgtgatttataccataatatagctgaatctggacagtattcggtaatgatgcacgcaaagggcctcgaatgcattcctttacttgtgatgttattaattcattcttactcatttttcctacatatttgattgcaagataaaacttaaatggaaagtaagacaacagaaatggacattttggaaggactgttgatggaatatggttttattctgggttaagagagataaaaaaccagagaggactgagcacatgaattggaaagtgaactgctttgagtaagaacatctgtgtttggcagttttggtaagttgaagaaatcattaacctacctcttcactttgaaagtaaatgattttatacatatttaatcaaatcaaataatacatgttaacttgtacagcctcttaatatccagctgggttttctggcaaggagatgctgaaacagagttaggtcgtcaaaagattagttgggcagaaggaactaagatcagatagatggtgatgcaggtctgatggtgtctatcagcccaatagagagctctggaacaaagagggcctgttagagaagtcctgttatgggtagaagttttgtgtcatgcattgttcaatcattggcagagctgcactgagaagtgatcttcacttactgtgttactcagtgattggccaggagctagcccaagaagagtatgaccttaaaatggaggtagaccgtgatggagctgttaaccaatcccactcctttcagctaggcagtgagtcctttctcacctcacacttcttgtagctaggaatctgagcaggccatctctaggtctgacacatcgttttaactttctctctcttccttccaagtctcattggctgacttctctccctctgctttttgcattgaggttctctagaaatcagtgcttattttcctccccatcgtatagattatttctggaagatctcttccacttccatggctctaacgtgacctctcatcctctgtggggattacctataaactgatagtgatttaatgtatcatttaggattgtactttgggggataaaacataaaaccgaaatgtaaaacaagtctgggggtgctcagtccagggttggtacggaggctccacagtaattaggaatcaagggtcctcttatctttctgctctattttcctgctatatggcttccatcttcaaggtcacatcatggccaaaatggctgctggagctccagctatcacattcttgacctcagcagaagaaaaaaggaagaatgagagggcaaaaagtctacctcccatttgagttacactagttaaagtagttttcttaaaagtcccacacagcattcctacttaacattaatgaacagaacatagtcacatggctacatctagttactagggaaactgagaaacgtattttttttttttttttttaacattgtagcctctgcaggagaggaaatcatgcaagaaggggtttgggatgggtattgagcatgtacatcccagtatctttcacactcccaaacctgggtttccaaatctttcttctgagttttggaaacatgtatttccctggctactagatatttccacctgtatgttacatgggcaactaatttgaacatgtgctaaactgaactccagtatattgacccacaataattacagtcttcccttttatacaattatgccgttaactacttggtcaacctacgttctcatttttatacttttctgtttccctcaatttccatactcaatcttatgaattctctcctaattatttttcgaatatatcctttcccctccattgccactttcagagtctttgttcaggacctcatgattttctgactagagaatttttattttgctttactaatctcagtcttgaacattctgatccatccttcataatgttgctgaagctatttttgcaaaacacaaatctgatcatcctgttccacagctgagagtcttacaccatctacactattaaggccaagctctttcagaaggcatctttcatgatctgacaactgcttctactttggctttatcattggccatgtcttaccatgtactctgtgtctcatccatgccatggtgaaatggccagaacacccaggcagagctaagccatgttaagacaaatctgaaattctgtctgtctcacctatctgtactataccccctactttggagctcttggaactcatgtccttctaacaaagctcagcggagttcttcatcctaatgaaaatgacaaaaggcttcttgatgttaggcgaaaactgatgagttggatttgcatatgttgcattaagctgatggtatgaaatccaggtggaaacatctggtgccctgagagtctagggggtggggaagtttgcaaataaagattttcataaggtcagcatagacctcacaatatattctgtgaaaatggatgaggcagaaagtttcagaggaatgcttcaatgtatttggttgcaaataatacaaacatagccaatagttccctacttatatctatacctgttgccattccagtatgtgtgtagttgtaatattgacttggcagttccagatgtcaggacacagcactggcttctgtattcttcttgaccttttctcatggtggcaggatgatgcagctcaatgctttatgtttttaatgtgggaatatcccaagaagaaagggaagggaaggaagaaatgttttttctcattatgtgccttttatagggagtcaaatatttcccaagaccctcttggaggtcttccttttaccattgatcagaaatgggccatgtgcctgcccttacatcaatcgctgccaaagggggagagtttcccatgattggggctgatcagttgttgatagatggtgagaatggcaactgaaagtgcctgccacagagttcaccaagacttaggattgaaccacagttttaaaagaaagaacatgaggctaaggtcagaatgtgatcaacaatgtcacatgtagcaaagatgtcaagacaaatgaggactgaagaaagactgagaagtgacaatgaagaaattgttcttgaactctaacagcaattatttcagttgagtgattaggctgaaagcagaaggtcagggagctatggagcaatccaacagtgtggaaacacaggtagaacatatggggcgatgtttttagttttctgagagtgaaaagaaggtgagtgaaagggtaagatagctagaggtgggaggggactgcaaataaagtgagaaatgagagtttttttttcaaagcagggaaacctggtgatatgatttggctgtgtccccacccaaatttcatcttgaattgtagttcccataatccccacatgttgtgggagggactaggtggagataattgaatcatgggggcggttacctccatgctgttcttgtgatagtgagttgtcatgagatctgaagtttttataaggggattttcccccttttgcttggccatgtgaagaaggatgtgtttgcttccccttccgccatgattgtaagtttcctgagggctccccagccatactgaattgtgagccaattaaacctttttcaatctcaggtatgtccttaaagcaacatgataatggactcatacatttggctatgtttaaaggtagggggtaaggaatcagtggagaaaaagagatagaaaggatgtaagaggaatggagaaaagtggatatgctaggtactatgggggatagaaaagaggaagacaggcatataattcaaggctggagggaaggatggaaaaaggtaggtttgcctgtattttgagaggatgacaaaagaaatacaaaggcttaaaatagcatttagagaatcaggaggcctggtcatctatggaatttattaagaagtaaaagaggagaggagaggtagaagaaaagaataggttagaaaagtgacagattaaaatgagaggagaagatctataaaatcaaaaatggggaaaattctccaagtttagaacaggaactagaaaaagtaaacaaaccccaaacaaaaacacaagtcctgggaaattaaatttaatgaccaaagagaaaggaagccagaaacctataaatttccgtgagaagggaagggttacagatgaagagaaatttgacatggaaaatccatttttggcttttcccaacctcatgctgtttgtgaaataaatgatgtttctcaagccttaaatgtttcaatttcctgagttgaaagatgccatgttactgttatactatttataaagttataaagtaaggctttgtttgctcaatcttactcaggatgagaaaatggaaaatatgcctctgggatagaattcaagtcagttaaattgagacacctatagcatatgcgtaatatgtatgagatgttaggtttgagatgacctaaaaaacagcatcctcccaacctgcctcaattggaatgtgttgaaaaatagacataagaatcaaacagatgtagataaaaatatcccttttgttactcataaagctctatatcatagggcatagcttagatctagccaagaggcttgcatgcactaccctgagtcaaatttatatcagtcccccaaactggaggcctttcatgcaggaataatcctgtcccaattagggacatctcagtatatcctcatttgttctttctggatggccaagaacaaatgaggatatactgagaaagcaggtttcctataggtggctggattttcaaagagagattggggggggtgctaagttaagcaaactcaaatcctttcgccaaactcatgaatcagataagtcacctcttcttctctgggcagagtcattgaggaaggcagggagagtcctgcagtctagctctaactgacgtccttcccatggcttgcaggcagatgaagtttcctccacaaaataaggaattgtattagggacaagggcacaggatatataaagataaagaacatggccaggcacggtggctcatgtctgtaatcctagcactttgggaggctgagacaggaggatcacctgaggtcaggagtttgagaccagcctggccagcatggtgaaatcccgtctctactaaaaatatgaaaattagccaggcatggtggtgggcgcctgtaatcccagctacttgggaggctgaggcagaagaattgcttgaacccaggaggcagaggttgcagtgagtgagatgacatcactgcactctagcctgggccacaaaatgagattctgtcaaaagaaaaaaaaaaaaaaaaaaaaaagaacatgcccatgcctgaagagccaaggaacttataagctagcatgaaagagaggaaatggcatgaatagcaatacagacatacaaacattagggcaggtggtagtcagtgaagggtgagggaaattgaagaaactgaagttgtaagggactggaacgtgaagaccttcacaagatttaccagggaatttggtctttattagacaagcaataggaaaccatgggaggtttctgagcaggggagtgagaaactgagtatcagaaagcagtgtgtaggatgggttagaatggaggaagggcttgaggcaagaggaaatgaagacctgaataaggcagtattcaagagaaatgttggagatggaaaccatggaagattggatatgagatatcaaaggacatgggagagttaaaggacattccaagacaatgagtttgttttaggatatatggagtttggtaggttggaaatatctgtgccttttttttttttttttttttttttcaagactgttagaagcaaacaaagaaacccacatagacaagaacaaatacataagcatttactatggggtgagccctgtcctagggtatagagatagcagcaaagaggtccaacctggtcctggtcctcatacagcttacaagtgatccaaactgttctcatttgtgagtggcagggcctcaactctcatccatgcagtgtcctagatacttaggaaatatctccaaggggatgggcccagaaacaaatctctctcctgcattcaccacattgcatatgttccacccatactctctgcctccagcttccctttgttctattcccattgcccgaaaaaccagtgctcacgagatgatcaatgtcacatgcaagggtgcgactcaggttagggcttcctgtatactttgtgttatgccttgtctcctgcactcatcaagtttctcttctattgtccagagtttcacagcagctgtcatggcttgtctctaatgtcttcactccatattctggagcttcaagggatctggtgaagtggatggtgcacagacattatttcattcccattcatgtgtcctttatcacttctttcagtccattccctaattgtgtgtgtgtgtgtgtgtgtgtgtgtgtgtgtgtgtgagagagagagagagagagagaaagaaagagagaggtgtgatctacactagcagctgacagctccaaacactttgttacttaagcaactgcaacaaagtacaatgattgtttagtgagggaaggtaaagagcattacaagggtagattgtactggtgataagagtctagagcagagattctaaacttttggggttcacagaggccttcgtgttttagcaattcttttagagtgccccatggcaaaataaatacctaagagttccatttattaagtagttaagtcctgatattttaataaattttcatgtcctaacaacttagtagctgcttaaaaagatacacagggcatactgtagaatgaaaacatattttattcttaaagaccatggttacttcctagtaacacgtgcatgcctgttgggcgctgcacagcttctcgaaccttggaagcagattggacgttgccaccctcgtttcttttttcacgttgaattcatgtggtacttgcttcttagatcacatctgccaccccaaagccaacttcaccaaaatatgacaccatcaaagggaatgtagtgacttcatgtggaaactgttaagtacctctgactaggaattctcccagtgttcagcagatgccagccatcgttgtgtttcccttgaaaatttaaaatatcccagaatgctccatgtgagtttaaaacaatgccctggggcaccttaatatgttgggatgggtggtcaaggaaggcctttggagtgaaagaatatttgaatcaagatgttaccaatgagaaaggatagttcaggcaaaagagtgcctgtaagagccttcttaacagggcaatagcatttatgaagaagtcttctttgtgaaggaatgtggtgagtttgaacagtgtatctgcatttctagagcacttatcactatctgattttatatttctatatatctagaaatctatatcaatatgtaccatatatacatttatgaatattacaaacaacatatactatatattctatgtgtctgtattataaattaatctattcacctatcattctattatctatctgtctatctatctatctacctatctacctacctatctatgaagacacacacatgcaatcatttccttgctgttgcaggggataagaaagggagttcactgggcatgagtcacatggtgtcttgcccaggctgtgaagcctggatttgtagcagaatgaatgagcatggttttagaatttcctccagcaatgtttgacaatccaggagcagaaacaaagaaaatggatggttggcttgattcggggtcaggaattggcaaaatagatgtggcagaaaatcaagaggtttgaagctgtgaagatttggaatgttcattgccttcacctccaagcatgatttacacgatggcttgggggagctgttattggcagggaggcctttgtggctcgccagttgcctgtcttccccatggctgcccaaggtcacctacagatccgaggttgcaactgctccttctgactttatgtcagcgtgggaagtgtggcctcactctggacaaagacttccaggtccctgggatttatctcactccttcaaaggatcacactagcagatttgtctgaaagcaacagcatgaaaaataagcttttccttgacttgccagttttggtttaaagcaccaacaacttgacaaagcttacttccaaatgctttatttttttgtccatatacatatatttttacatattatggtaagcagcttctaaaagggctctcagtggcctctgcctcctggttttcatgccctcatggaataaaagtgtgagctgaacctagtgacttatatctaatgaatagaataacggcaaaagtaatggtgtgtcacttcagagattaagttacaaaaaactgtgacttttctcttatttgccctctcttgctccctcacttactcatttacataaagccatctgctgtgtgtgacctgccctctgcagaaggccatggagcaaagaaacaatggtcacttctggccaacagccagtgaggaactgaagctgtcaatccaacaaaccagaaagaactgaatcctgccaacaaccagtgagctgggaaatagactcttccccagtcaagtcttgggatgacccccagccccaagtaacacctccatagcagcgtgtgactgattctagggcagagtctaagttgtgcctgaattcttgaccaacaaacaatgtaaataattaatggtgttttaatcctttaagtcgtgggataatttgttacatagcaatagataatgaatacacaaacgtcacaaactgtaagatgccattaatggtaagataccttttattttatgttccccaaataagaaacactcctgccaatatgatctgccaatatgatctgtcataagatggatagcgcactgttgattttaatacatagcataatttcagagatgtgtgaacaaaatgtgcatcttacaatcagtgacactatggtagttgtaatcatcacatacacaaattttatataatgtattttttcctaatttttttttttttgagacagggtctcactctgtcaccaggttggagttcagtggcttaattatggctcactgcaacctctgcctcccacgctcaagtcattctcccatctcagccttctgagtagctgggactacaggtgctcaccaccatgcctggctaatttttgtatttttttgcagagacagggtttcaccatgttgcccaggctggttttgaactcctgagctgaagcgatccacccgcctcggccttccaaggtgctagtataacaggcatgagccaccgcgccaggctcctggatgttttatcgtggacatagtccaaggttgtatgccatctttatcccatccatttttctgtgtgtgtgattttttttttttttttagtagagacggggtttcaccatgttagccaggatggtctcaatctcctgacctcgtgatctgcccgcctcagcctcccaaagtgctgggattacaggcgtgagccaccgcgcctggcccccaatccatgacaaaaaacttcgaatagtacatgtccatgtattatttctaccagtttttatatacttccgggaatagtctgcgcacactcaagcatctctcttcccttgttttctcttctctttgttttttctcttttaacacacttggtagcacactaagtgcattgttctgcaccttgcgcttttcagtgagcaatgtgtcttggtaatagtttcataatactttgtaaagatcctcttcaatattgaggctgagaagtctgactttagcatttcctccaccattttttccctctaaattattattattattttttttttgcgacagagtcttgctctgtcgcccaggctggagttccgtggcgcaatcttggctcactgcaacctccacctcctggattcaagcaattctcttgcctcagcctcctgagtagctgggattacaggcatgtgccatcacacctggctaatttttgtatttttagtagagacggggtttcaccatgttggtcaggttggtctcaaactcctgacctcgtgatccacccacctcagcctcccaaagtgctgggattacaggcatgagccaccacgcttggcctctaagatctttttaagatcttttatttattcatgatttgtaaagttctgtgataatttagctctatttttccttctgatgctggcttccttgtatattctttcagtctacaggctgctagcttttactcctgtatgtatgtgtataaatgtgtgtgtgtgtgtgtgtgtgtgtgtgtgtgtatttttctttacctgttttctgtttgtctggaacggaaacttctattcctgttatttgactgttaggttttctgggttaatcctttctctcatgtcttgcttttgcccataatttttatttcctgatctctatttgctatctttgtgggaaggaaactgggatgaactttatattcatggaaagataaagttccatagaaatttttactttgcgtgctctagctttatttattaagagctcttctttcctcactgattaataaattcttgttttatggatacattatcttctcatatctttccaaggatgttatgttaaggttgttttatggatgcattatcttctcatatctctccaaggatgacatttagcacaaatcccttcctttcctttccctttctctttctctttctctctctttctttctttcttttctccctttctggctctgtctttctctttcttcctccctttgtctctcctttttaaaaaattaacccaaactttggcatattgagaaataatgtgggaaaagaggtaaggcagatgaaagaccaagaaaccacttttattaaacaattgaagagtcaggtagaggatgcagtttagtctaagagtccagtgggcctgcaaactcaaccccagaactgggaaacttaggcagccaatcacgggcaatgctgaactgggacaggactcctcccatggtacgactgttctcactgaggggtagaaaaaaacatgctctgtcttggaaagactcactcccaggaggaaagggtggagctgaactaagtctgaccggttctttctcccagactcacctttactgccctgtgggagaggctagtgggagggtgggcaaggccagagcgtgtcctgcctccatgtggagggagatacgggaagctggtaagtctccctgccaacctctccttggggtggagggtcagttcctggtttctggcactctgtgtgtgggagtaggtgaaggtgctgactgttataaatactgaattccatcttagcctccagggttgctcttgtgtccccctcctacactctgtgatatcagatgtccccagcttatgagtttctctgactctctgtggtggggagaggcaggtctattctcagccctctgcttttattcacagctttctctgccctgctaaagaagttactccctctgccctgtttctccttcctcaaaactgtttatctttcccattcaggacatctcttgtcctgatgtctctgtttgtgagaatttatgtatttttttctcctttactgtggaaagagatgcattaaagcacaagctttagattcttacacttgctttgccgcatactaactatgtgactttggacaagttatttaacctctctttgccttagattcttcaattgtaaaatggattgttataaggttggaaagtgacaacacatgtaaagtgcccagattaacgtctggcacccagagaacattcaataaatattagtcatcatcattaccatctcagcatcttcttagtggagttttgggaagggtaggatgtaaatatgagtgttctattaatatcgccatctttctacatcaacttgtccaacctgcagcccacaggccacatgtggcccaggatggctttgaatgcagcccaacacaaaattcataaacattcttaaaacattacgagatttgtgcatggacttttttttttttttcagtagctcatcaagtaatgttagtgttagtgtagtttatgtgtagtccaagacaattcttcttcttccaatgtggcccagggaagccaaaagattgaacatccctgtatctacatggtcttcgtagcttttgtttttattggtactttctccacactgtaatttccatggaggaaaggtctatctttttttttattctgtattatatctatagcacttggcaaacacatgacctatggtatgtactcagacaatatttgtggggtgaatcaatgaaaacaaattcgctcataacatttcttgtaggagacaatattgtatggtaatcaaaaacatgggcttttaaatgacactgtttgggtttgaactatggctgggtcattcactgatagtgcaaccttgaacactttcttaatttctctacccttcaatgtccccacctgtaaactgaggataaaaattgtacctacctcataagggtaatatgaggactaacagcaataaactgtgaagcatttaacatcatgactggcacatagtaattgctcaatgaacattagcttcgatcattggtggtgcttttgtaattgtttattgcctatatgccagtcactgggttaggcacaagtatatacatcacttactgaggccctatgatttgctgtatactgtatttaatagcgtacacagtagtacttccttttcttttcttgttttttgagacagagtctcgctctattacccaggtgggagtgcagtggtgtgatctctgctcactgcaatccctccctgcctcctgggcttaagctgtcctcctatgtcagccctctgggtagctgagaccacaggcacacatcactatgcctggctagtttttgtatttttttgtagagacagggtttcatcatgttgcccaggctgatctcgaactcctgagcgtatgtgatccacccgcttcggcctcctaaagtgccgggattacaggcatgagccacagcgcccggcttgtagtagtttctatagtcagatactgcgtgtggtttctatagtcagtggatttgaattcaaccctgctattcagacctcagctgaataacttagaacaaattagttaatcttattgagcctcactattaatatttgtagaatagggtaatgataaacctacctatagggtagttatgaggcaaaccatgtaaagcccttagcacagagcttagcacatagtacatgctcagtaaatattagctatgatgatgatgatgttgacaacaacaattatggtggcagtgacaatgataaaaccatggtaattatagtggtgacaggaatgatagtggtgacaacagcgatggttgtgtctgtgacaatgttgataagggtgtcagtgatgccggcaatgaggataaccatactgacctgagaggcaggaacatgcaggagttatgtgctttggttgtagagtcagaggaacctggagccaagtatctgttctgtcttaactagatgtgtgactttaaggaagcaattttatctaattaaattttggcatcctcttctgtaaaaacaatcattgtttcgcagggctgttgggaagtttaaaaaaatgttatatatcattccttaaagatgcctatttttcatattttaacatctctgaaattagaaatgcatcttgcagttactgtcagccaggcagaactaaatttgttttaatttttaatttttgtgggtacatggtaggcatctatatttgtgggatgcatgagatactttgatataggcatgcaatgtgaacattcagactgaatttttctttctcttatattctctttctcatgaagacacaagagtaattctatgacagtcactaaatataagtacaaaagtcttctcaataagtagaaaataaaacctcaaactgataaactgtgttataacttaactgacagtgttttatttactttttaaaggtacaaaaaataacagtttgtccttcaggtgatagaattttagttttgatgaaaaatagtaacacgttttgaacaccacacagtgtaatagttacctctttcatctggttttgtcccattttgctgtaataagatttacacaaactaagaaaaatatatacctatagtagccagtcttcagagggtcccttgtgatctctgccttctggttctcacacccttgtgtaatccccttccactctgagcagggatgatttgtgtctggtattgcagagaagacagagtgtgacttctgaggcctggcatccaaacattgctgcatcccttttactcttttttttttttttgagatggagtttcactcttgttgcccaggttggaatgcattggcatgatctcggctcatggcaacctctgcctcctgggttcaagcgattctcctgcctcggcctcccgagtagctgcgattacaggcatgcgccaccacacccgctaattttgtatttttagtagagattggtttctctatgttggtcaggctggtctcgaactcaggtgatccacccgcctcagcctcccaaagtgatgggattacaggcgtgagccaccgcgcctggcctctcttactctttaaatccctcactctgggaaaaccagccactgtgtcatgaagacactcaagcagtcccaagcaggaggtacacatggtgaggaattgagtcctcttgccaacagccagtgaggatgtaaggcgtcctgccgacagccatgggagtgagccgccttagaagtgggcattccggtccctgcctccccaccctccactgacatcctggttgtaattttatgagagacactgcttccgagccattctagctgtcaccaaaccctgactcgctaatcacacattctatgcatgtaacaaaatatcacacgtaccccataaatccataaaatattgtatatcagtaaaaaagtattgttaacatgaaactgtggttacttctccaagatgaatacatgcttcaccaaatgagattttattttttaagtgaaggaatccagttaaaagcaaaaagaggttaagaaaaacaagataggccaggtgctgtggctcactcctgtaatcccagcactttgggaggctgaggtgggtggatcccaagatcaggagttcaagaccagcctggccaacatggttaaaccctgtctctactaaaaatacaaaaaaaattaaccaggcgtaatggcgtgtgcctgtagtctcagctacttgggaggttgaggcaggagaatcgcttgaacccgggaggcagaggttgcagtgagctgagattcactgaactccagcctgggtgacagagtgagactccatctcaaaaaaaaagaaaaaaaaaaaataaatccagaggtctgatgaatacccaaaagtcggctgtggaggtccctctgcatacgaagggtaggaccccaatggttgtgtttcactctgtgtgtgtgtgtgtgtgtgtgtgtgtgtgtgttttcaaagttggcaattatggagtctttccactgattcaaactaataaatcaccatctctcagtacaaacttgatttggagttaaaagtcatgtcaatcatgtatatcgtattaaaatgtaataaaagtgaacactgaaatttttacaaataacaccatgaaggaaaattcggctgaagacattatagctaatttgtaaaaggataattaggaatattcaagaaacatagggatgtgaatgttcaaaattattagtatctggaagtaataaattgtaacttttttttcacccaccagattagttaagaacaaaagaaatgtgatgtgtcaaagtgaggagagagactgtggatgggaatgtaaatacatggttcaatttttcttttacaaaagacttgtaatcaaagttatacatgtacagagcttttaaaaagtccagtggtaccatgaggaataatataaaagatagtaatctcctgccccaccccttctcacactagatcctgttccctggagccaactgttgtccactcttttagcaagttctttcgctatttgcttttttttttttttttgagacggcattttgctcttgttgcccaggctggagtgcagtggagtgatcttggctcactgtgacttctacctcctgggttctagcgattctcctgcctcagcttcccaagtagctgggattacaggcatgtgccaccacgcccagctaattttgatttttagtagagacagggtttcaccatgttggccaggctggtcttgaactcctgacctcaggtgatccacccgctcaacctcccaaagtgctgggattacaggcgtgagccaccacgcccggcctgctttcatatcttaaaataatatgcttaaggaactctttctcgatttttggttttatgtattactattgacatcttactagaaaacaagaggctctacctctgtcttagtttttgttccccacaatagtcgagttgccaataaaatgtaggatgctcatttaaatttgaatttcagttgaacaacaaatcattttttatacaagtatgtcccaagtatagcatgggcaaacttgtatgaaaacatgatttgtcatttatctgaaattcaaatttagtggggcgttttgtatttttatttgctaaatctggcaaccttgcgtgaaggagacacagagataaagacagtacatgatatggtttggctatgtccctacccaaatctcatcttgaattatagctcccataattcccatgtgttgtgggagggactcagtgagagacaattgaatcatggggtggtttccctcatactgttctcatggtagtgagtaagtctcatgagatctgatggttttataagcagaaacccctttcgcttgggcctcattctctcttgccatataagaagtgccttttgccttccaccatgatcgtgaggcctccacagccatgtggaactgtgaaaaagaactctttttctttttttttggagacagagtttcactcttgtcacccaggctgcagtgcaatggtgtaatctcagctcactgcaacctccaactcctgggttcaggcgattctcctgctccagtttcccgagtagctgggattacaggcacacaccaccacacccagctgatttttgtaattttagtagagacgggggtttcaccatgttggccagcctggtctcgaactcctgacttcaggtgatcttcccgtctcggcctcccaaagttgtgggactactggcctgagctaccgtgcccacccacctctttttctttatagattacccagtctcggatatgtctttatcagcagcgtgaagatggactaatacagtacacaatttaatcaaaaggcactccgaggaagcacaagcaagaatgaagggagaacgagagaatgaagagagaatagtcaacgaagggtccatttagtgagtggattgtcactgtggacgatctgagctcagtcatgctgggagccctttgagagactatggagcatacctcagaattgtcccgctagagggcaggagggtggagataccagtgcactggctgcagtccctccttggttaagggtggtcctcacatgtctgggttgccctcgtgctgtagccacgcatttttatttctcccacctcccattcttgggtaaatcaacatcgtatatttacactacaatgattatatagctgtgattcaccactgagctgcaattgcgtgtctcacacaactttttgtattcttgggcttaataattgcttcctccattattcgctttaggtttccattgcatccattactaattcaatccttaactttctaagtgaatggataatctgagaatacatttgacagctcaggtactccctcaatttcatcatcttttcttgacaccctctcactctgatccttgttctgcttttctcatctggtctggttgctttctaggcctacaggtcttaagatgtctctttactgccattcctgaaaaatcctgtaactcctgttctgggttggatctctgtttctcaaatcacaagcccttactttctgggtgtactttcttattttgatggagaatattctccaagaacctcctgatatggttaggctttgtgtccccacctaagtctcatcttgagttgtaatctgcataatccccacgtgttaagggagagaccaggtggaagtaattgaatcatggcgggggcggggagggggaagggggattgggggaggtgggggagaagggcggtttcccccatgctgttctcatgatagtgagtgaggtcttatgagatctaatggttttataaggggctcttccctctttgctcggcacttctcctttctgtcaccttgtgaagaaggtgccttgcttcctctttgccttctgccatgattgtaagtttcctgaggcctccccagccatgcctgaactgtgagtcaattaaacctctttcctttgtaaattacccagtttcaggcagttcttttaagcagtatgaaaacagactaatacacctcccaagaaagaattcatgagaagtaaatttttgtattcttgcatgtctgcaaatatctttattcaaataaagaacatcgtggctgaatatcaaattacattgggcattattttctccagaattttgaaggttctgctcattgttcaattccaatagcattctgaagccttgttcattccatttgatctgctcttttctctttgttctgaactttgttgttgttgttgttgaatttcatcgttatgtgccttgtgggtcttttccccgctatttattgtgctgaacacttgatgaaaacttccagtctggaaaatcacggccttcactccttgtgttatttctttgcaaatttcttcccttctgttttccatgtactctttttcttgtaacatttcttcttttcttccttcttttttccctttttttggatgtagaatttcttgaatagaccctttagtttttctatcttttttctcttattttccttattttatctttgagttttacttgttggtagattttttcaactctatttcatttcaaacattctatcaaattaaaaatttctacaattattcttttaatttccaagagctgtttcttattctcttattatctctttttatagaccatcattgtataataatataactatttctctgaggatatttattatagttaaaaaagtcattttgccatctgcattgtctttatttccatgaaattttttctcttagtttgtttcccaccctgccccctgaccctcaacgtttttttttttttttttgacattcaaagcttggaagagagctgggacccaactttgtaacataccaattcaaagcaatgcaaaactacgtaaaagctgacgtcaatgtctaactcttctaggctgttcatttatacttaccagagagacactaaaatgcaaactctacactggtgggtaattgacaaaagcctgtcaatttggaacttcactgtcaagtgatcaagtagtaacctggcatttcactgggagactttcagatatcagtgtctgtaggatttttctcctggactaatcagtttccttaaaaaggaatcctataagacccttcctgtggtctaagtctagctgctaatgttcttgaagccaagtggagatagggctggtacccccaaaactggatttagacttcaagtaaaagaatgttttgcctcccaggctggagtgcagtggtgcagtcttggctcactgcagcctggacttcccaggcttaactgatcctcctgcttcagcctcccgagtagccgggaccaccaccaccatttgtagagatgggggttttgctgtattgctcaggctggtcatgaactcctgggctcatgtgatctttctccccagctccacaaagtgccaggattacaggtgtgagccaccatgcctggcctaatacactctttaatacaataataccttgtagatctctttccatttccaataaatatagatcatcattgggaatgaatacaaagtattcttctatatagatctgccttattttgcttattaatctcatattaatggactttcaagtgatttctagtttttctctattgtacagcacgcagtaatgaacatccttgtgtaattcctagaattgtgactgcttgtggaaaggtatgcttatttacatgttgatacctgttgccaaccatcctctagaggtcttgcccaccagtgtttcatttttagatagtaaaatccatttctcttgactatttgatttctttgattacttcaagccttaggaattttttttttaaacctagcatagctttatgtcatttttctataatttgattaaaaagacaaaaactataatccaagtgaagcacagaggctttcgacttcctgattttattagaaatcaagtgacaaatcttttctttagggctgaagagatcttttcttcctttctttaggtgaggaagggttgatttttataaatatttgtttatttattattcttatttctatgagtcattcaggacttattcttgtgcaaaatgtgaaagaaagcacacagaaaacaataaataaaatagtgcatctgccaattcaaccacctctctgttgtcaaattcatccttatccccaagggtagtctgagtttatcacttttgtgggtaaccttccattgactttcttttgcatttacatatagagcatgcacaaacagaaatacatagatctgttgtgtgtgttttttaatctaaaagtgatcatgcacacatattctgcagagtgctttttccaacccataatatgactttgtattagtccattttcactctgctgataaagacatacctgagactgggtaatgtataaagaaaaagaggtttaatggactcatagttccacaaggctgaggaagcctcacaatcatggtagaaagcgaaaggcacatcttacatggtggcagacaagaaataatgagagagccaagcaaaaggggaaatcccttataaaatcatcagatctcgtgagacttattcactaccatgagactagtataggggaaactgcccccataattcaattatcttccactgggtccctctcacaaatgtgagaattatgggagctataattcgagatgagatttgggtggggacgcagcccaactgtatcaggcttggaggcctctctctccatgtcagtttccctaagcttacctcattccttttacttatttatttatttttgagatggagtctggctctgtcacccaggttggagtgcagtggcacgatctcggctcactgcaacctctgcctcctgggttcaagcgattctccttcctcagcctcccaagtagttgggattacaggtctgtgccatcacacctggctaatttttgtatttttagtagagaccaggtttcatcatgttggccaggctggtcttgaactcctgacttcaagtgatccgcccacctcagcctcccaaagtgctgggattacaggcatgcataatatagatgcactatagtttattgaactatttccaaatgatggacatttaggttgttttccctgttaaaaatgatgatatagtcagcaacaaatgactttgtttcttccagggactctttctctgagacaaataatggaagtggaattgtcagaggcatgtgaaccatagcaactccatcttaaataggagctgggtaaaatgaggctgaaacctactgggctgcattcccagacagttaaggcattctaagtcacaggatgagataggaggtcagtgcaaaatacaggtcataaaaactttgctgataacacaggttgcagtaaagaagctggccaaaactcaccaaaaccaaaatggtgacaagagtgacctctggtcatcctcactactacatgcccaccagtcctatgacagtttacacatgccatggcaacatcaggaagttaccctatatggtctaaaaaggggaggcatgaataatccaccccttgtttagcatctcatcaagaaataaccacaaaaatgggcaaccagcagcccttggggctgctctgtctatggagtagccattcttttattcctttactttcttaataaacttgctttcactttgcactgcagacttgctctgaattctttcttgcgggagatccaagaaccctctcttggggtctggatcgggacccctttcctgtaacggaactgctgggtcaaaggaggagtatatttgaattatcgttgcatttagagcagtgtttctcaaccgttttttctgttattatcctccccccagaaaaaattaaattgaaattattaaattaaagtaaaatgacaagctaatttaattgtaaattaagttaattaaattacattaaatttctccctgatacgagaaattaaatactaaagaataagattttgttgagtagggttgtaatattgccccctttgagaatgcatgattcggataaacacaagttgaaaactttttgtttggcgagtctatggaatagacacatccctctgttgtaagggttgtaagatccaactcttgaaacctgtgcagcctctagtaattgtagcttgtctggagcccttcaaaaatatttactaaatggaactgaatgttgataacacaacgtcttagaacattatcatacccgccataaagcagagcagatagactgggttaatttattctccttccttttacattaattaacattgtcaagaatcactagaatgtcacttgataattcacagagaaaaaacatggagaagaaataattgggccggaggctgtcactcgtgagagcttgcttaggcattccttttgcagaagctgtgcatcattgaggagcagggaacctggcccatgaggctcattgtttgacatatgctctgtgaaaagtagggtggcaggaaaacctaagctgttgcatttgctatgtgagaaaaaacttgatggccccgaaagaaactggcccccctgatgtgggaaaactgcaaaaggaaaggcatgacatttagaaatcatttctttagctctgtcgtatgaatccagtgatcatattagatgtgaaaggaaggggactttcaatcattacaggaacaagacaaaagtcaccaagcagagagaataggaataggggcacagacacagctgttgtctcagtgctgttgggagaataaggatgcttttgccgtctctactgcagaaaagctgtggtctaatctttctgccttgcactggctgtgttgcttggacaaattgcttggtggctctggtcctcagctgggctgcatgagctggaagcaaaggttttgctcaaatcacttgagtggagagatttgatgtcaaaacatttggaattacagctgagagctaataaaatgctaatgtaggaatgaaaagacttcctggagttctaagtaacatttttatgtatgtgtgaacattttaattttcatatttatggtttcactttaaagtgaattagaaaaaaatcacattaaactactgacttcatagataatatttattgctttggatgtgtctcttaagaaacaaaattcattgtaaattgacttaaataaaaataacacataagggttgtatatggatatggttaaaaaaagactgaaggagttttggaatgaatacggtttgggaaacagtgactatgccatttttttttccccctagaattggctccatgccccaccacttagcatagactggtcagaagcagttaaaatcattccttgtgttttctgtagctgagaaggaagaacatggaagaactctccaagatggtttcagcacttttgttaggaatccaaaacataagacattttctcttaaaaatactaatagctaacttttattgagggctccttgtgccaggcactattctaaatattttatgtattttctttcatctaatcctcatgacaaccctgggaactaaattccagtattaccctttttttttttttttttttttgagatagggtctcattctgtcacccaggctggagtgcagtgccgcaattttggctcactgcaacctctacctcccaggttcaagcgattctcctgtctcagccttctgagtagctgggactataggtgcacgccaccacgcccagctaatttttgtatttttagtagagatggggttttaccatgttggccaggctggtcttgaactcctgacctcgagcgatcctcccaccttggcctcccaaagtgctgagattacaggcgtgagccaccacacctggctagtattatcatttttgtctccatttcacagattaggaaattgaggtccagagagcctgttgcttaaggctccagagctgataaagtagctaggctttgaactcaggcagactaattccagggcctgtcattttctccatgccattcttatgattgcaagacctcccagaatgaggaatccttcctgctggaacagctaggagtctcgatttttccggaagcttgaggctggcttcctagacaagtgcttctcacactttaatgagctttccaaatcaccaagggatcttgtgtgaaaaccaggattaaggagatgtgggttgggaccagagatccagcatttctaacaagctcccaggcaatgctgctcctgatgatccctggagtgtgctttgaatagaaaggtcaagagcctcttatttttatggaatgcacctctcttgctttttattcccctgccctgtctccaaggcatcaactgagttcagggtgcacatgaagttggatacaaacccacgttgttgagaccggacatttggcgattagattcagcacagatgtgtcctcagatttctccctttctttgttggctacaaagggagcatatctaactcctctcaaagagaaaagcaaccaatggcatcatgtccatagggcaaaggcttagctctccctttttagggaaacaagattcctaatacattgagagagcgttcagtgttagtcttgagccttgggctgcaaacctgtttttttaactttatgtaacatcttggctctttttccaaaaagaagtgtttcaaaattgtttgacgtccctgctctgggatgtctacaaagagacaaattgtcctttcatatgagttgacctggcaatgaagcatggcctgtcccttttgctgtccagaaatctcccaaacttgtggccggtaacctcttcctttctatcctttccgaagattccctttggatggaagtcagctgtgaatgctctcctgatttgcattcaattgtataaattgtcataggtacgactctttgttcagaagcttgagtgtatgagaaaaacaacttataatgtatttttgaaattcaatctaatttatatttcaatctcctatttctctagggcggaaaaatgtaatctcagttaatttgaggtttcttcctgccctggcattgtatttaaattcaggggaactggatgtctcatgggtttttctactttttaatataatctggttatatgggcattgggtaagatatctgccgcctgatttgatccttcctcattggcccaagcatgtcaccacggagacttccttgttcgtgtctatatggttcatacatggccttccccttaattaaagatgtcttccgaggaacattttgtctaaggtaagaatcctttccagactcctaacatcataggcttttaaaacattggagccaggaaaaatattgtttgtttctctgcttccttctttaagctcaaccttatgccctaaccaataaacataaattagctttgctgttaaaaatggagaaaaggccaaaaaagagataccatagatacatatttaaaaaatatcactttgctacaaaatctaatgtcccagatgaattgccatgcaatttgtgcagatctatgtacgtttctattctttttccatgctgcacctgtttaaatgatagatcattctcctaaatgctcttccttgtacttgtccttctctgctatggttcactcagcctctggcaaagaagtatggaactgggagaggtggaagattcggagctagaggagaaggaaggaggataatgaagcacacctgagaactttgctgcatcgtggttttgaaagtgtggcttttactgttgcccatcatatgcaactgagttcagagggcacataaagttggatacaaaccactttggtgaaccagacatttggcgattagatccagcgcagatgcatctatatgcaagtttttagtgagatgagacatagtaatggtgattaactcgattgttgatataatactggtggtaagctcattttaatgtgtagtttattggagttgttaaggacattattttcagagtaagaaagccacatttgattcctggctttggcacttccacatagttgacttgggcaagctactaaaccttcccaattattgcaatgggaataacagtggtgtctatatggtaggattgctgtaagatttgaataaggtgatgtaatgcacactaagagctaagtataatgagtgcctggctcatggcaagcagaatgaatgttaacttataataacaatcatataaaaagagtcaattttctgaaaatttcctcattttagttatctttaagtaggtcttttctttgtccttatttctgagcatggaaaaaaccccagaggcaaagaccattagtcaactgatcttaaggaccagcagacaaagcttctgatgtaaatttgccatcattcccttcacctcagaagttatgtctctaacatatcttatgttgagtgtgctgacttagcaaacctgatgccctagttttaatacacaagacttgcagcatgaccaccaggaaaatgtttccaaatgcttgttgtggaaagagtagttagtctgcacctgtcaacatcgcaactggattcgtctcaaaatgcaagacacatggttcggaagctggcaaaggaaaggatattttcaccctaaaaacacagctcatttccattaattgagtctgaatagtcacaagttgcaaagctccagacaggttttcacaagcccaagagcagggactgacaatatttacagcgctctaagctgaatcgtattactaggaagttcataaacatggaggatgcctgctctgctgtcacttgtgtgatatctgggcttctgctatgattttctgggctcctttaatccaggacctatggttgggaatgacaaacatctaccagtttctgagttccaactcatgttggttgctattatgccacccaggtcactctcttgggaggtctccatggagctcctctttccatctctagacactctctcaatccttgcatgtttctctcatcctttctctcagctttgcttttttcccatctagtttcctcttcaacaaaacaaaataaacatcacagaaatgaaccgatgtcatccagtttggcagaagttttgtctttatggggtattataatatttacctctttccaaacttcttgatattgaagtttcctctgacttctgtaggttcctctcttaggactctatagagtcgggaattttagtcgttcttccacttacgtcaccagaggatgaacatatctgtttttatatgttgcacaaggatagcataagagacaaatgaagtgttgtttcacttcatgaacaacaaaagaaagataaataaagtaggaacttttgtttttaggcaatgatgtgaatgaatttaaattcatattgattatataagcaataataataacacatcgtgggatttaaaatatatttagatttaaaatgtaggctaatttaaacataaataagaatggggctgaatggagttaaagggttccaaggtctttgtctggagagtaggtaaagacaccaattaatgttctgctttgataagccaaggatgcatgttataatttccaggtagcactaaaagaatggttaatgcacgtacaactttcatgctaatagagaaaagatgtaataataaagaaatcaattcgaaacaagatgagaaaagacaaaaaaggaacaaagaacagatggaacaaatagaaaacacatgatagatggtattttatctgcttgatgacatacttactactgaattatgtccccttctcttccccaaattcatatattgaaattctaacctccaatacctaagaatgtgaccgttatttggaaatagtgcctttatagaagtaatcaaggttaaatgtgatcattaaggtaaatgtgatccaaaatgactggtctctctataagaagagaatattaggatacagagacacagagcagagatcatgtgcagacagagggaaaagatagccatttacaagtcagggagagatgcctcagaagaagccagcccagctgatgccttgatttggacttctagcctccagaactatgagaaaacaagtatgtattgtttaagctgtcaggtctgtggtattttgttgtggcagccctagcaaactaatacagcttcctagacatatcagtatttatgtcaaatgcaaatggactatatggtcaaattaaaaggctcaaattgcaatgaaagaagacccttgttggttacaagagacatatcaagaacacaagaatgtggaaagattagaataaaaaggtgaaaaaaaaagataacactatgaaaactctaaccaaaagaaatttgatgtagctatgttaagattaaaaatgctgtttttaatgcaaaaagactggtagagataaagaggaatttcataatgccagaaggatcaatttaccaagaaggtataaaaattctcaatttgtatagatccagtaatatggaatcaaaaaggcagaaatgaatagagtcacagtcatactgacagatttttatcacacttgtcagtggctgataaaataagtagatataaaacagcaataatacacaaaacttgaataatgcaatcaacaaattttacctaaggacatgtagagaatattgcagccaacaactggagaatacttactaatttcaagcacaataaaaattggctatatgctgaaacgtaaaggaagtctcaccagatttcatgatgcaaattatatagtgtttgatttctaaacacatttaataaagttgaaaatcagtaacaacaaatggtcctggagtaactaggcatctatatgcaaaaagtgaacttcaacctgtacgttgtacataagaatgaactcaaaatagattttagatctaaatgaaaaagctaacattataaaaaaattagaaaaaaaaacagaggagaaaagtcttcatgtcttcatggcctttggagaagaaaagatttcttacacagatcacaaaaaggcactaatcataaaaattagtcataataattggacttcattgaatttaaaactttgcttttcgaaagacactgttaagaatcaaagaagcaagccacagactcagatgaaatatttgcaatactcatatatgacaaatgatttgtgtccagaatgtataagtaactcttgcagctgaatggtaagaggataacaaaaactcaataaaaaatgagcaaaagatttgaatgcatacttcacaaaagatatcttaatggccaagaagcacatggaatgatgccgaacattattagtcataagataaatacaaattacaaccactaagatggtcaaaatgtaaaaggttagcagtagcctgtgttagtgaagatgcagaaaaactataaccaggctgagagtgctggctcacacctgtaatcccagcactttgggaggctgaggtgtatggatcacctgaggtcagcagttggagaccagcctgtgtatggatcacctgaggtcagcagttggagaccagcctgaccaacatggtgaaaccctgtctctactaagtacaaaaaactggcccagcatggtggcacatgcctgtaatcccaggtacttgaggctgtggcagtgctcatcacacagtttcccacacggggcaccaactgtggcagtgcacctcttatgggggcgccagctgcggggaggggtctgtccgttgcagacccctgacccggtgacggatgaataacgtacactgacacacagatattctgctttgcctgtccagctgagtgtgtctcagccgcttacagactccctgctgagtcctgtaaacagtcgtgacttggccctgatcagctagcgagactcacatttatttggtaagattaattaataaaggcttgagctaacaccattaaagggtaattgacattgtggacttcctgagtaaaaagcacttaagtacctgtggtacaataaaggttagtcttaagatcatatgagtaaacaagctagctaggtaaactactctgccttcctttgttactactttaattttgtttaactaaagataaagggaccaggccaccttcagccagatctattatagaagttatgcaaacttctcggccttccaagaagatttgtgtctatctctacactatctctaatatttttcccaccagcctgattgaaccccaaccagaggctgaggcaggagaatcacttgaacccaagaggcagaggttgcagtgagccgagattgcaccattgcactccagcctgggcaacaagagcaaaactccatctcaaaaaaaaaaagaaaagaaaaactagaacctcatttattactactgagaactgtagaactgcaaagtggttctaaagttgtagaaccactttagaaaaaattgggcgatttcttgtaaagttaacacattcactgtatgattcagaaatttcattactatgttgtatgtaagaaatgaaaacacatgtctacaaaagaattatatataaatgtttattgtagttttatttgtaataacaaaaagctggagacaattcagatattcatcaaacagtgaatggataaacaaatcgtgatatattcattcaatggaacacttcttcagcaataaaaagcaaaaagctactgatacatgcaacatcatggctatgtctcaaaatcattacgatgatgaaagagggtagagtaaataatatgtgattctatctatacaaaattgtacagcaaacaaaactagtttgcaatgacagaaagcagtttagtggttgtggttaaaggtagagttggagaactttttttggagtgaaaatgtatgttcaatatattaattgtggtcatggttacactaatgtttatgtttttcaaaactcacaaaactgtattatgtataaatgcatataatatattgtatgtaaatttgaacctaaattaaattgatttaaaaagaaaaaatcaataaaaatattaagaaatacacttctaaataaaccgtgaggcacagagtcaattataatggaaacaaaaaaaatttgaattgaatgatattaaaaatattagatgtcaaaacttcctgttaaacaagtacttagtgggaaatgccttaagtacatatattgaaaaagaaaaaaaagtgttgaaaattaattaccaaagtgatacggtttggctctgtgtccccacccaaatctcatcttgaattgtaatccccacatgtctagggagggacctggttggaggtgactggaacatgtgtgtggtttcccccatgctgtcctcatgatagtgagtgagttctcatgagatctggttgtttgataagtgtctagcacttcccccttctttttctctctctcttgccaccatgtaagacatgccttgcttccccttcttccatgattgtaagtttcctgagacctcctcagccacgtggaatgtgaatcagttaaatcccttttgtttataaattacccagtcttggatagttctttatagcagtgtgaaaatgaattaatacacccagcatccactccaataagttaggaagaaaatggccaagtaaacttcaaggaggcagaagaaaagaaataaatattacaacagacaataatgaagtagaaagcaaacatcaaagctaaaatttggccatttgaaaatactaacataattgataaacttctcataagattaattttttaaaaaataaagaatacacagaagactaatgtttgaaataaaaatagagacaccaccacagacctttcagacattaaaaagatgacaaaatgattttaaaagaagacaaagaaagaaagtaggcacaaatggttacctaaaatgaaaaggaagatagcaacactaatcctacagacattaaaaagataagaggattttataaatgctgttatgaagtgaattgtattccctacccccaaatttgcgtgttgaggtcctaacctcgaatgtgaccatatttggatatatgaccttttaagaggtaattaaggctaaatgagcttgtagggatggggccctaatccgatgtgactggtgtccttatgagaggagaaagagcaactaagaatgtgtgcatagagaccaggatgtgaagacataataagaaggcagtgtggctgggtgcagtggttcatatctgtaatcccagcactctgggaggccaaggcaggtggatcatttgaggtcaggagttcaagactatcctgaccaacatggtgaaaccctgtctgtactaaaaatacaaaaattagccaggcatggtggcgggtgcctgtaatcccagctacttgggaggctgaggcaggagaatcccttgaacctgagaggcggagattgcagtgagctgagatcgcaccactgcattccagcctgggcaatagagtgagactcagtctcgagaaaaaaaaaaaaaaaaaaaggcagccctctgcaagtcaaagagagagacctcaggagaaatgaaacctgccaaccccttgatcttggacttccaggctccagaacctgaagaggcaagccacagactcagagaaaatttctgttgtttaagccacctagtctgtggtattttgttacagtaccctagcaaactgatacaagctcaaataaatttcattgtttagataaaaaaataaaatctcttgataaagcaacttactcaaactaacacaagaaaaaatagacaacctgaatgctcttagtgaagacattgatccataattaaaaatcttcattctaaggaagctctaggccaacgtggcttcactagcaaattataccaaaaaatttaagaaaaaaatgctactcttccacaaactcctccagagaatgatgaaaggtggatcattctcccaatgcattcccatcataactttataccaaaataagaatacataaaaaccttattgaaataaatggaaaaaagccaggtagattagttgaaaaatgaacatgatctgaagatgcacttcaaaaggaggatatacagatggccaataaacttatgaaaaggctcaacttcattaccctgcagggaaacgaatgttaaaaacacggtgaggtaaccgtacacacccaccagaatggctaacattaaaatcaagcagtgaggaggaacttgggtaactggaactcttacacactgctggctacaggataaattggttacagtcactttggaaaatggtttggtagtttttactgaagctgaagattcatatacactgtgacccaggaatttctctcctagatatatagctaatataaataagtgcatgcagttatatacaataatttcaaagcagtatcattcatgataacactaaagagaaaacaatacaaatacccatcaaccacagcatggataaatgcattgcaatatagcatgcaataaaagtatctattgcaataaaaattaataaattatagctacataaaaaatggggatcagctgggtgtggtggctctcacctgtaaattccagcactttgggaggctaagacagaattgcttgagcccagaaatttgagaccggcctggtaaacagagtgagattctgtctctacaaacaaattttaaaaattagctggatgtggtggtacatgtctgtagtcccaggtacttaggaggctgaggcaggaggatcacttgagcccaggaggtggaggttgcagtgagctgtgatcatgccactgtacttcagcctgggtgatagaatgagaccctgtttcaaaaaaatgtggatgaatctcacaaatatgaagtggagtgaagtaagctattcacaaggatgatgacatactctaggattccacttatgtaaagaacagtatagactgaataaaactatagattttaaggatgaacaaatagtaggtaaaaatgacataaaaaggcaagtaagttattaccataaaaggtggatggtaccttgtgggggaaggatggggttgtgattaggaagaggtaagcaaagaggtgctagagtcttggaaagttttgtttcttgaacttgatggttgttatatgggtgtatgctttatggtggctgtgaatttctttttcacttttccctctgtgctttatgtttcacaataaaaaaagttaagattaaatgagaaaagtgagcaccccaaattctttagaattaaaatgtaagtttcatgaaaggtattgctattagttctagcctttgtaatcttacatccattcacctattcatccatctgcctaccacccaaccatccatccatccatccatccatccatccctccattcatctattcttctattcatctattcttctattcatatttccttttaccatttattcattcacccacacctgaggcagttcggttctccctagaaaattatagagattgacagtttgaataataatgactagaccttgagatgaatgattgaaccatttctgagctgcctagttttcctctcttggaagccaacatgttcctcactaagaactgggcatgggtttggttttctattgatgtgaagccttacacagttgtaagatctgtagatctgggctagggtacagagaaattgactgtccactttcttttaatttgcattcattgataagatcattatgaacctgtgctgacacagctataatctcagggagaggcacacacagtcccatgttgcataacaatgtttttgtcaatgaaggatcacatatatgacagcggtcccattagattataatactgtaattttactgtaccttttctatgtttagatacacaaatacttagcattgtgttacaattgcctacagtattcagtacagtaacatgctgtacaggtttgtagcctaggagcaattggccatatcatgtagtttaggtgtgcagtaggttataccatctaggtttgtataagtgcactcttggatgttcacacagtaacaaaatcacctaatgatgcattttttgaatgtatctctgtcattaagtgatgcatgacaaataaatgcccatatacctggaatcagaaattccattcctaagaatctattctcagaaaatactagtgctggtactataaagatgcaagtacaaaaagtgtttatttctgagttgtttgtaatggcaaaaacaatgtagaaatatcttaaatttccatcattaatggactgatgaaagaaattatggaaaagtcatatgatgaagcataacttcaccttttataaatgagatttatgatgacctagaaagttctccaagttatattattaaatgtaaaaggcaaattacagaataatacatttgataataagatatcacttgaatagaaatggtagttctcaatatatatgtgcaggtacttgcatatggagtccaaaaggatatacatacactccaattttaatgggtgatttatggggaaagaaatgagattgggggaaaggaaactgaaaagggactttaagattaccgtactttataattctaaattttagaattgttacaagaacacattcatgcattacttgtgtgttttaaaagtaatttttaaacctttagttagaaaattaaaaagtaatgcctgatcattttttaaaaattagaaaatatataaaataatgaagaaaacatttaaaaatctgtattttccttatccagaccccttcaagtcttattttaataattataatactgtatttttactgtgccttttcaagcctagtttgtgcttgacagtcatagaatgaaccaatctttccaagccttgcttcaagcaccaaattctactgaaataaaagaccttgccttgtacaatgaagatgacgttgagctagggattagatgatttaatttaaattgcatccgtaacccaggtcaccttgaacaagttatttaacctctctgagctcagtgaacaggtttgcaaaatgaggataataacgtcggtctttctgcaggactactgtgaggattaacgaagtaatctgtgacattgtgctttgcctctacgtggacctagtatattatcaagactgtcatagatggctcttattattttgagatacgtcccatcaatacctaatttattgagagtttttagcatgaagcgttgttgaattttgtcaaaggccttttctgcatctattgagataatcatgtggtttttgtctttggttctgtttatatgctggattacatttattgatttgcgtatattgaaccagccttgcatcccagggatgaagcccacttgatcatggtggataagctttttgatgttctgctggattcggtttgccagtattttattgaggatttttgcatcaatgttcatcaaggatattggtctgaaattctcttttttggttgtgtctctgcccggctttggtatcaggatgatgctggcctcataaaatgagttagggaggattccctttttctattgattggaatagtttcagaaggaatggtaccagttcctccttgtacctctggtagaatttggctgtgaatccatctggtcctggactctttttggttggtaagctattgattattgccacaatttcagctcctgttattggtctgttcagagattcaacttcttcctggtttagtcttgggagagtgtatgtgtcgacgcatttatccatttcttctagattttctagtttatttgcgtagaggtgtttgtagtattctctgatggtagtttgtatttctaagagctatctatgacaaacccacagccaatatcatactgaatgggcaaaaactggaagcattccctttgaaaactggcacaagacagggatgccctctctcaccactcctattcaacatagtgttggaagttctggccagggcaattaggcaggagaaggaaataaagggtattcaattaggaaaagaggaagtcaaattgtccctgtttgtagatgacatgattgtatatctagaaaaccccattgtctcagcccaaaatctccttaagctgataagcaacttcagcaaagtctcaggatacaaaatcaatgtacgaaaatcacaagcgttcttatacaccaacaacagacaaacagagagccaaatcatgagtgaactcccattcacaattgcttcaaagagaataaaatacctaggaatccaacttacaagggatgtgaaggacctcttcaaggataactacaaaccactgctcaaggaaataaaagaggatacaaacaaatggaagaacattccatgctcatgggtaggaagaatcaatatcgtgaaaatggccatactgcccaaggtaatttacagattcaatgccatctccatcaagctaccaatgactttcttcacagaattggaaaaaactactttaaagttcatatggaaccaaaaaagagcccgcattgccaagtcaatcctaagccaaaagaacaaagctggaggcatcacactacctgacttcaaactatactacaaggctacagtaaccaaaacagcacggtactggtaccaaaacagagatatagatcaatggaacagaacagagccctcagaaataacgccgcatatctacaactatctgatctttgacaaacatgagaaaaacaagcaatggggaaaggattccctatttaataaatggtgctggtaaaactggctagccatatgtagaaagctgaaactggatcccttccttacaccttatacaaaaatcaattcaagatggattaaagacttaaacgttagacctaaaaccataaaaaccctggaagaaaacctaggcattaccattcaggacataggcatgggcaaggacttcatgtctaaaacaccaaaagcaatggcaaccaaagccaaaattgacaaatgggatctaattaaactcaagagcttctgcacagcaaaagaaactaccatcagagtgaacaggcaacctacaacatgggagaaacttttcgcaacctactcatctgacaaagggctaatatccagaatctacaatgaactcaaacaaatttacaagaaaaaaataaacaaccccatcaaaaagtggcgaaggacatgaacagacacttctcaaaagaagacatttatgcagccaaaaaacacatgaaaaaatgctcatcatcactggccatcagagaaatgcaagtcaaaaccacaatgagataccatctcacaccagttagaatggcaatcattaaaaagtcaggaaacaacaggtgctggagaggatgtggagaaataggaacacttttacactgttggtggcactgtaaactagttcaaccattgtggaagtcagtgtggcaattcctcagggatctagaactagaaataccatttgacccagccatcccattactgggtatatacccaaaggactataaatcatgctgctataaagacacatgcacacgtatgtttattgcggcattattcacaatagcaaagacttggaaccaagccaaatgtccaacaatgatagactggattaagaaaatgtggcacatatacaccatggaatactatgcagccataaaaaatgatgagttcatgtcctttgtagggacatggatgaaattggaaatcatcattcttagtaaactatcgcaagaacaaaaaaccaaacaccgcatattctcactcataggtgggaattgaacaatgagaacacatggacataggaaggggaacatcacactctggggactgttgtggggtggggggaggggggagggatagcattgggagatatacctaatgctagatgacgagttagtgggtgcagcacatgagcatggcacatgtatatgtatgtaactaacctgcacattgtgcacatgtaccctaaaacttaaagtataataataaataaataaataaataaataaataaataaaaaagaggaacaacaacaacaaaaaagactgagatttttcttgcaaccaaaagataaatgaaagatacttgtgagagttaatcacctccttcaggaaacaggttcttcagattattggaaacatttatcaatttaccatgtctctggcacagacatcagcagagccaagagtaaccggaatgggtacctcaatctgagcaacgaggaaacagagttatgcttcaggaaaggaaatagacacttgttttgcttttgtcttgaacaaaatgcttggattttaacatacaagtagtgtttgcatcacctcttgagattgtgtagtgggtattttttgaggtatagccccagcatcccatgatcctgtctttgtgcccttatcaagaatagtggacccctggaagccattttgtatgatgtgacctcacccctggtcaccgatgattggcttaaaaaggggcagcttgctcaagccggcccaatcagagtatctcttccaggagcgagcttggaaaatgccagcctctctattgaccgaagctgtatcagttaaccctttgatggcataataaccttcttctttacatttattaaaagtgagatttttgtattccattgatttttgtcctaactcagaggatagaatttgtcagtagtggtaagactaaaattatacctgttgtggttttctggctcttctatctgtcacgctttctttctcgctttctccccttaaccctcctaccctcactccctgcccccgtcctttttctaatcatgcacataaacaaagggatagacatattcacaaaacagtagtacttgtcacgaacattttttttcccactgctgtgaaagtttaaaaaaaccaacgaaataataataggctttcccatccacaacccccattccttaccagctgttgtattttataagccaacaaaacaaacttgtggctggacaaagcagcttccagaagaggcaggcaaattcatttctaggccagcagtttaattggatgcaacaaagaacatggtgtggcttttctgggcacttgaagtagaggcaggcttttcgttccagcaaacacaggctgcagaagctgtatgatttgtagtaattcattcgacatgagcaacaattgtgaagaagctttgtgtcatcaatatgagtccccaaacaagtattttaaaataatgaccttcacagccaaatttataacggtatcctctctaccacccactgccccccatgagtagctgagaagccagtctgggggtgtgggaaggtaggatcctcccaagaggaatgaaaacactggagagagagagaagaagaaaagaataaggagaaatcattcttcctggtctcctgatggctttcctgttcctgattcctgttcttcagttccatgagacactccagctgccttataataaatcaccctttatttatttatttatttatttttttgctaaagttggcttgagtgaagttctgatacttacaacaaaagaaatctaaataatactaagagatataactaccctccttttccaatgaggaaaccgagagtcaatggggtgaagtaacttgcccaaggtcaaatggctttcctccccaggtttatttcactcccaagaccaggacctttccacagagctgatgaggacaagaaatgtctaagctgacagcagcctgaattatgagggcacgctgccttgctgatcttctctctctgcaagaagtcatctaataagaatctcattcctcatttatttgtttttcctgtgctttcttataattcgtcttcccatttttctggtcaggaggaaaaccctgcctccagccacagccctgaaaatctctgagttatggtgggttgatgagagagggatttggaaacgagattttgattctcctcctctccgatctgaggccaggcagcatgcttgctgtttaaccgctgttaattaattgtgtactatgagattaaatatatctattaggctactagcctttaccatcatcattacaagtccatgaatgttaaaatgtacaggaggaattgtgaagatttactgacatcaaaagttcttctggaaacaaactttgtaaaaaaaaaaaaagatgtattaaattattttaattgtgggaaaaaaaaagcaagtggcaaattttagtcttgtcagtcttccaaagatcaacacactctagcttcccttccaccttgtctcatacacaggcatttctgagatgaaagaagtgggccctgccattgaacagaatttatgcatttaaatattcatcatttctgtgaaaaagagaagaaagtaagtatcacccataaacctataatcttagtgccatccgtgtttgaaatttggtacatttttttccccatcctttttcttatgcatcagtttcattcagaggtgttgtcaaatgtctatttaatttctaacatgcttttaaaaaacttaacatgacagtattagcattttccacactgctgcctgtttttttacacccataaatgtaaggacaggcaaaatttaagattgtagtgtaattatggtggacattcgcatgctgtatgtagccttcctctctccaaaggccaatacgcttattattaggagatgagccaaatattccttctccccactccacagaagccaggacaggggaacaggatgtaagttcagccacataatgctttaagcctagtgagaggagtgcaaaggtacaggaagatgaaaaatgattccgtgtagaggtggcactgagggtgtgtcaatggctgctgggtgtgaactggtggatccagcggcagcatataacatcattcctggggcgtgaccctgtctctcttcccacttctcagtctctcttggttcctgccattcccaatccaggttcttcctcctcctcatagacttagaactctctgttacctttttaataatttcctttctgcctacattagccagaggcatatcatagccagaaactctatccctggaactaggtcttcacagcttggacagctgagttcattcattctgttcagttaaaaactatttattaaacctctaccatgtatcttgtgctgctctaggaagtagaaatacggtaataagaatcagttttaaaaaaatcatcactcagctgggtgtggtgactcatgcctgtaatttcaggactctggcaggttgaggcaggtggatcacttgagtccaggagtttgagaccagcttgggcaacatggcgaaaccctgtatctacaaaaaatacaaaaataagccaggcatggtggcgagtgcctgtagtcccagctatataggaggctgaggtgggaggatactgagcccaggaggtcaaagctgctgtgagccattgtcatgctactgcagtccagcctgggtgagagagtgagactctgtcaaaaaaaaaaaaaaaaaatcaccactcacatggaacttactttctagtggaattctggtatgttttaatggaagataaggttgtatctgaattactattggtaaaggtgagcaaaatttagagtgatgtaaacagttaaggagaggtgcttataaggttccaaatggttaaactgtatataaaccctagttcagaatggaaagcctgcatgacctctacttgctttaagttatgtagtcatgtgtcgcttaacaaaggaggcacgttctgaaaaatgtgttgttaggagattttgtcattgtataaacattatagagtacgcttacaccaacctagatggtataacctcctacacacctaggctatatggggtagcaaattactcccaggctacaaacctgtacagcatgttactgtactgcatgctgtaggcaattgtaacacaatggtaagtatctgtatttctaaacatatctaaatattgaaaaggtagaataaaaataaggtattataatcttatgggatcaccttcatgtatgcagtctgtcattgaacaaaacatcattacgtagcatatgactgtatttatgtgtttccaaacatatcagcagtgtgtgaaagtgctccttatcctgccttattgctgacatgggatattatcagtagttgttaaatatttgctagacatcaggaagaatagctaatggatgctgtccttgatagctgggtgatgggttggtctttcagcaaatcatcatggcacgcgtttatctatgtaacaaacctgcacatcctgcacatgtaccccagaacttaaagtaaaagttgaaggaaaagaaaaatatttgctacaatgatttttgtctctttagagtttaaaaaaaggtgagcatattttcatgtttgctcatggtttgtttctttttgggtaatttgttttctttacctcattttgttttctgttgagatgtttgcccatttcttgttgattggcaataactctatagtctagatattatttctttatctatcatatttgctgcaaatatttctcccagcctattattggtttgttttaactttgtggtatcttttgtagtgcagattttttttatttttgtgtagccaaatctgtcaaatcttctcatttttaccttctcagttttatgtcttgcccagaaaggcttagctttagaattataaaaacattttctaatgcttttatagtcttgtgctttatctttaggtatttaatacatctagaattcatttttgtaagtggtatgaaggaggaatctaacctctttttttaaatggaaagccccaacacagtttagtaaatactgattctttttgtcctccccttcaaaaatgctacacgtacgctatatgccctcatattcatgcttctgtttctgggatgaaaagaatgaattctaacatgcaactaactccaaatcaatatttcttatggagatatgcaatttcccaatatgaaaaccaaactaactcacccaactcagattattcttttgatttcataccttcagcattgtggctggttttctttctcacatgcatgttacccggggttgctcctgaaacagtttaccatataaatagacttcatttccccagcaaacgagggcaggtctggtagttttttctgtttcacatattccccaaccctatagggttttacatggagctacaaattagccaatttcaacagactttgcttttggaatattctttatgccttgttctcatttgcttccaggagaaatcataatattaaggattcttgggagtgagaaggagacataatatattctaataatattagagtcacacgcacataggaatcacatagattccttggtttcatccctaaagtttctgatttattggtgtaagatttagccctagaatttgcacttaaaaaaaatcaggcctttgctcttcctgcagcctactctgttatttgtaaataagacagcaattgggcaaccagagctgtgagaaaaaaaaaactggtatagcaagtgattctttagggccactgttgctattttaataacaaaggatgctacaaataaacccttcagtcctgtcatttccaaggccattttgacatttatttcaataaataacaacaaattatttcaataaataacaacaataataaatagcaacaagctggaggtgtctttctaactaaatgaatcagcaaggcctccccccaaaaagaaaaaggaaaatccaaaagcaccagattataaacatcactgttgagtgtctttcagagtgaatggagattatgccattacacccacacacttctctctcttctaaaggcaccatccgcggaaagattctgatgctaacatcagtcagttgttgtggaagatgacctagaatgaaccattgcttctttttctaccgtctattctggaaattattaacagatagattcccgagccagaagttgagaaaacactgggaggttgtttattctgatctggatttttagagatgcaaatgcagcaaaggagttatgaacataatgaagggaatcacagtattttaaccagccatctgtacatcaaggcctcattgtgtcttcctgaaaaaaggtaaatgggtgctctatttgtcaagagaggagaagtgacttctggaatctttacttctgataactcaagtccagacccagcaaattagttcatttataaagcatctcatttctcagtgccaatgcatatgcccataaccacccttgtctcagcacaaatatacatgcaaatgcatgcacataagttgtgctgcttttgttttcacagttgcaaaatgattgctgtacccaaaattgcattcctatttaaggcaggaagaaggggggagggcaaaaggataaaaactcaagccagttgggtccattcttaacaagagctcttccggaagcctgtctagcaacttccatttgcatctccactgttgagtccagcagcacggatagctagggataatgactattgcagtagggaatattctatcttgaatattgaatatgaagatggggatgcggtgggtaggtaaaaaggggagaatgaataccgatagttaagtagcagtgtctgccttggtttaccccaagtatttctcaaacctatccaattttctccttccctaccgccaacatcccagtgaaaccacaatccactctcagctggacattcttctagctggtcttcctgcacagcaaaaggatgtttatcttttaaaacttacatctattatgctgctctgctggttaaaacttataatgtcttcctatattagttagaataaaatctgcacatgtttttatgacttaaaatgcccacatgacttgatatctcccacttatttttttcccttctttcctcctggtttgtgacagtccaggcacgttggcctccctgcagtgctttaagcatgtcatgctctttcctatcttagggcctatgtacttgtttctccctctgcctgccttctctcattcttcaactttttgttcaatgtcacttttttttttgaccatcccatctggaacactgtgatggtttttttgatgtgtcaacttggctaaactacagtctccagttcacaaacaaacaaacaaacacgagcttaggctttgctgtgaagatcttttgtagatgtgattaaagtccataatcagttgacttgaaaaaaggatgattatcctagatcatctcagtgggcctgtttcaatcagttgaagggacttaaaagcagaaccaaggcttccctgaagaagaaattccacctgtgaacagcagcttcaatccattcctaaagtgccagcctgccctgtggatttcgaagctacctaggcaggtcccacaactgagtaaatcgattccatgcaataaatctcttaatatacatctcctactggttctgctttccgggttaaaccctgatcgataacaatcctcctcctcccacctactagttgatctttatcaaactgccccatttatttattcaaaagcactgctcttctgaaaaattctcttgctcatttatacattttctgttctgtttttttgtcttccctactcggatgtctgctccatgaaggcagaatcagtgcctaccacattcaacactgtagaacaatacatagcccatagtccatggtcactaaatatttgcggaaagaaagaatgaatgggaatctagtaataaaatctggcccaacaattcactcccaggttacattaaattacacttcttggccgggcacagtggctcacgcctgtaacctcagcactttgggaggccaaggcgggcagatcttctgaggtcaggagttcgagaccagcctggccaatatggtgaaaccccatctctactaaaaatacaaaaaaattatctgggcgaggtggcaagtgcctgtaatcccacctactgggaggctgaggcaggagaattgcttgaacctgggaggcggaggttgcagtgagccgagaccgcgccattgcgctctagcctgggcaacaagaatgaaactctgtctcaaaataaataaataaataacacttctcagttataactgcagaaattatttgacaagactgcaaggaaaaatatttgaggatattgattatattgggaactaacataaatattcactgataggacatctgttaaatgcattgtggtacattcattcactgaaatgctatacaactactgaaaatgaaaaggtagctctatatgtgtggataagaaaataatttcaacaaatgctactaagtgaagaaaggaggctgttagaccacatgtatggtaattaatcttcacaagtatttaaaagaaaaagataacatgagaaaccacattttcaaatggctgcttcatgatatatacttgtgactaacaaaaaccctaagatagcttaaagtatgaaagatggtgaaatctgctgtctaagtcattgagaagaattataaaatgtaatgtttaaggaaagttcagacagatggagtaactgtttcttttcctttttcctagggctctgtgtttgttatgtgatggctggggtggtaggttgtataaacatcatgctttccttctcctctcttctcaaaatatcacagggatgtaatcgatgacttttctggctacagtgtattacttatttggaatattcacatctggatcaattgtcagcacgtttcttggttgttgctttattcattcatgtattcaactaatatgttgaactaagcaccctggttgggcatcgagcttaggaaagtaccttcatgagatagtttctctcttcaaggagtgttataatttactcccaagcatcactcacattgtgaaacccacatattactccaaacaattgttagaagatgatagggcagattctgttacattcagaaaaccccaagaggctcaatgacttatctgggagaacctggaattgtctcttaactggcattcagtgctcattgaaagccagctcacaggccctttctttcatcccagaaagtgattccaggtttttcctttggctcttttatagaagggtgcctcttatgggtttaactatgtctctgcaaaaattcatttgttgaaatcctagctcccatcatctcagaatgtgaccttatttagaaacagggtggttgcagatgtaattagttgagatgatgtcatactggagtagagtgggtccctaatccaatatgacaggtgtcctaatgaaaaagagaaaggctgggtgtggtggctcccctctgtcatcccagcactctgggaggccaaggcggaaggatcacttgaggtggaaggatagcttgaggccaggagtttgagaccagaagtttgaaaccaggagtttgagaccagcatgggcaacgtagtgaaatcccatctctacaaaaaaattaaaaaattagctgggcattgtggcaggtacctgtagttccagctacttgggaggcagaggcaggcggattgcttgagactgggaggggggatgcagtgaggtgtgcttgtgccactgcactccagcctgggcaacagagtgagatcctgtctcagaaaaagcgggggagaaatttggacacggacactcaggcacacagggagagcaccgtgtgaaggtaaaggcaggataggggtaacgcagtagaagccaatgtgcacccaagactgccagcaagctgccagaagcgaggggagaggcagggaacacttcctccctcacagcctcagaaggaaccaagcctgccgacaccttgatctagacttctggcctccagaactgggagacaataccgttctttttacctttactttattgaaaaagtgttttaattttttttaacttttattttaggtttggagatacatttgaaggtttgtcacaaaggtaaactcttgtcatggaaatttgttgtccagattatttcaccatccaggtattaagcccaatacccaatagttatcttttctgctcctctccctcctcccatcctccccgctcaagcccaatacccaatagttaccttttctgctcctctctcctcccaccctcccccctcaagtagaccccagcgtctgttgttcccttcttggtgttcgtaagttcttatcatttagctcccacttataagtgagaatgtgtggtatttggttttccattcctgcgtgagtctgataaggataatagcctccagctccatccatgttcctgcaaaagccatgatctcattcttttttacggctgcatagtatcccatggtgtttgtgtaccacattttctttatccagtctgccattgatgggcatttaagttgattccatgtctttgttattgtgaataatgctgcagtgaacattcacgtgcatgtgtctttatgacagaatgatttatattcctctgtgtatatacctggtaatgggattgctgggtcgaatggtagttctgcgtttagctctttgaggaatcacgatactgctttccacaacggtttaactaatttacactcccaccaacagtgtgtaagtgttctttttcgctgcaaccttgccagcatttactttttgacattttaatcattgccattctgactggtgtgagatggtatctccttgtggttttgatttgcgtttctctaatgatcagtgatattgagcctttcttcatatgcttcttggccacatgcgtgtcttcttttgagaaatgtctgttcatatcctttgcccactttttaaggttttttttttcttgtaaatttgtttaagttccttatagatgctggatattagacctttgagataatagacttctgttgttctaagtcacccaggttttggtactttgcatggcagccctaggaaactaaaactataacaaatcttatttcttagaaaatatatgatttttcactattgctgactgaaccaaaaaaaacagttttgaggctagatcatttggagactagtcattaacattgatttaatatttgattcaatgaaaagcaatttttttcttttgtttctattttttcaatttatggttgacacatagtagttgtatataattatggggtagaatgtgatgtttcaataggtgtatacattgtgttaattgaatcagggtaattaacatatctatcaccttaaacagttatcatttctttgtgatgagaacattcaaaattctctttgctagctattttgaaatatacaatgcattattattaactgtagtcatcctactatgctactatgcaatagaacaccagaacttatttctgctttgtaactgaagttttgtacccattgaccaatctctctccatcaccccccactccctattatctgttaatcactgttataccctctacttctatgagaacaacgttttagagtctacatgagtgagatcatgaggtatttgtttttctgtgcttggcttattttacttaacatattgtcttccgggttcatccatgttgtctcagatgacaggatttcattctgctttatggctgtatataatattccattgtgtatatatgccacagtttctacatccattcatccactgatggaaatttaggttgattccatatcttggctattgtgaataatgctgcaataaacatgaggtacaaatatctcttctatatattgatttcatttcccttggattttttttggataaaacctcaaaaatatgggcaacaaaagcaaatatatacaaatggaattaaatcaaactaagaagcttctgcacaggaaggaaaacaatcaacagagcaaagagacaacctacggaatgggagaatatatttgcaaactatacatctgatgaagggttaatatccaaggctgggtgtggtggctcatgtttgtaatcccagcactctggcagtctgaggtggaatgatcgcttgaagccaggagtttgagaccagcgaacaaagtgagaccctatctctacaaaaaatttaaagattagccaagtgaagtggcatgcacctgtggttccagttatttgggaggctgaggcggaagaatcagttgaacccaggagttggaggctacagtgagctatgatggtgccactgcactctagcctgggtgacagagcaagatcccatttcagagaaaaaacataaaataaagactcaaacaactcaacaacaaaaaaccaaataagccaattaaaaaaatggacaaaatacctgaatagatatttctcaaaagaagacatacaaatggccaacaggtgtatgaaaaaatgatcaacattgctaattatcagggaaatgcacatcaaaattacagtgagctatcaccttagtcagaattgctactatcaaagacatgaaaagatgacaggtattggtgaggatgtggagaaaaaggaacctttatatactgctggtgggaatgcaaattagtatagccattatggaaaacagtatggtgttaaattaaaatttaaaaattaaaaccaaaactgttctgtgatccagcaatcccatggttgggtctacacctggcagcaaacttcctcaacacctcctcaatcaagcgctgtgtgctaactgtttaagggctctaactgtatgatacttcttagttgtctgtaaggaatagctagtctaaggaggaataggaagagataagaaaagcagacacattcacataagacactactgtaatagaagttcagatgttactggatttaagcaacaagcaaattaattctgtgtcatctaggctttaaacactggtgagattctgacaggtctaaattgttgggagaaggagggaggacatttaagggagaaaatttcaaagtggtttcattttacgtgagcctgagttagaggaatttgaaaatatgatgcataggtatattaatggagtttcatttactgtacaaatgtggaattattctcatttctcaaataaaaaaagccaatttattctataacttccaagctggagggctgagtgaataataaaatgtgtttgaatttttgtgaaacgttgatgcatcttttcctggttaagcaaaatactcactattccacatcactattatttagtccagataccaatctgttgtttatgggtattgaaaattctgatcgtggtgattgctgtgttgccattttaatatttacagttattataatttttaaatcttttatatagtgtgaaataatattatctagacttttattttgtgcaggtgctaagcctgatacaaaaaatgtgcctaaaaatgtcaataactttggaaagctagatgtattaaaatgcctgaaggagaccaagcagtggttatgataactgtaatagtaatttagaagaatgcattagagctaatgttgagaaaaaataaaacagagtatggtaggtacaccttaggttcacaaaattctgtaattggacaaaattatggtgaaaatgaggaaactgatggctacatatctgtaagaataattttgcttttaactgtatatactccaaacattatatatgttcctgcaggacaattggtcctaagatatgttaattgaagaaagaaatttctggcataaaatgtgactatctctagcttggaagtcaacttaaagtgggaagtagtagaggtaagaagagcacagaggagtggaagctaagaataggaaagggtgcaagaagcacagctgggcacggtggctcacgcctgtaatcccagcactttggggggccgaggcgggtggatcacctgagatcaggatttcgagaccagcctggccaacatggtgaaaccccatctctactaaaaaatacaaaaatacaaaaattagctgggcgaggtggcacgcctctgtaatcccagctacttgggaggctgaggcatgagaatctcttgcacctgggaggcggaggtttcaatgagccgagatcgcaccactgcactccagcctgggcgacagagcaagactctgtctcaaaaaaaaaaaaaaaaaaaagaaagggtgctaggagtacgtgtgttgtggagggtctccaattctcaggtgaggcactgatgcttagcttagtttaccaggcaacaggggaacctctgaaagggttagagcaggccagtgacactgtgcctgagatggtagatgctcagtgaagttgagtgttgagtgaatgattggtcagaaccaccctggagaaaattgttagtacctttacagggaagataataggtaagatgtaccgagggtcctgagatccaacaggagtgagctcatgaaattcctcttcggccaaagtaaagtgccccccaggcttccactgctttcaaagaaacagcagtgactggctcttgctcttgattcctggaatctcagaattctgggaaattgggaaaatcaggaaatgtgaaatacatttggttcatataaattgcaactctttttttttcttctaataagtgtttgttgctggtagaatcacacagctgtttcctaaatcaaagatcaatttgttatattatttttactagtggcttaggggtaattgtttctggaaaacatctgttctataattagaaaacaaagatttattttccctgactgggtgtaattacttttggggaccgagggaaagctttagaattgccatgtcaattcaaagaggattgtttgcagtgaaatatgtccttttaatttttcttaagtagctcggaggctggaagaaaatgcatgtttattagcattgtataggctgtaatagaataaagcaaaattcccagatgtgtatgggcttgttaatacaaataactccagtgatttcaactcagtcaattacaaagaattccatttttgaaaagaaatgaatggatatcagagtgttaagggcctttcctggcaagtccatagatagttctaattctaattctctaattagaattagattgattgcccctttggcaagcaaagactcttacagatgccagggacttactctgatttgctttttgtggtgacgtagggtggatttgagctcacatgattccgtgcaccctaagagagtcctgctctgaggcttgattttcagccctgtcttctgcttgcgaacgtgtcgccctccaccccatccctgccacccctcaccactgtaccctgagctctcactcatttctgcagttctcctgatattacatccaagccctgattacatgctgttcattgagtcacttgaccttcccagtctcaattgtaccctgatgtcaccagtttcctattgacatatgtgacaacataaatgaatctcaaaataaactatgttgagtgaaagaagcaaggtgaaagagtacatgctattttgtggcatttatacaaaactctagaaaatataaactcatctgtagtgacggaaagatctgtgcttgcttggggctgggactggagaagaccaggaaggagaaattccaaaaggaaacttttgagggggatggatgtgtttgcaatcttcattgtggtgacggtttcatgagttgtgtacatgtgtcaaaacttatcaactcgtatacttcatcttaaagtctgtttagtctgatgttagtatgccatgccagctctcttatggttgaaattgtatactttaaatatgttcaattgattgtatggtgattataccttaataaggcatttttctttttcttttagaataacccagtggaaatctctcacataagaagtgatagaactacacatctgagtgtaggacgatctgattctaaagtccgtgcccttgactacttagtaattattgcttcttctgtaatgcaaatagccactttgtgtatttggtatggctgaacttctttaatattggaaggtttgggaacagggaataaggttctttcccatacctctgatggggggggaatattagagtttctgcagagtaatttggtgatgtcttgaaagctttatgaatgcacatatgctttcatttatcaattccatatataggaacccatcttaaggaagtaagaataaatttctgcaaaaacttatttacaggcataataagcacaatttgtttcataaaaatgaaaacttggaaaattaatctgtaccatgcagccattgacattattttagtagaagaatatttcctaacatagaaaaacattcagagtatatgattatgcaaatagatccattttaataaaatgtataagttatctgtgtgaagaaaaaagtctggaagtaggttttaaatggtaatatggtagttacttctgagagaggagtacagataatgggcgattttaattctatcctttgtgctttttttatattttccacatttttcacaaatggctatgcagtgatttcatttatcagataaaaccataagtaggtaccacttaaagagaaggtatacctgtgtgtaagtttgctttcttgggtgctcttaaacttctggatatttccttggatgtagtcatccattaggatagatggaggaacatcccgggtgtgggtgcatatttataatgacactgagtatacaagtgtggtttttaggattagaaaacccaatcgttcaaagaaggagtgttcctacctgagtcaggtagaaaccaggtaactggaccagcaaggtaattgtggcagagaactcgtgattgggaaagagatcacatcttatcctgatggagctcccttgcccagatcaagggcagggcctgtataaatagggcttttggataaattgctgcccctatacactagcccgccattgagtgtgcaaactcaccccttcactgccatgaagttgctttacctcctagctcttttgagaccttgagatgcggtcgtcataccatgtctcactttaccatcagccttggtctctgccatgtggctgcagatgctctgctaccttcctacacatactgttcctctcacttggctcttcctttctttctctcccactcagccttaccctgtgtcctctggaatttctgtgcttgaccttcaaattcccctacattctctatctttttacacactgcttctctttggcattaaaacttatgtttatccaatcagaaaaaaatgtctccttctacatatccaaatatccattggactctaacatttccatattccatagaaaacacatatagttccttcctgcagcctggaaggaatattgtgagagaatagatacattcttcaccagctaccattatctacaaatagaacttgtgagttgggcataacctttaggccaattctctatacatgtaaaaacaatagaccactttattcaccaaagtatgaataaaacatataaaacagaacacttcatctttccccttaaatatgtcctttcttcatattattttactttttgaaatgtgaagtaaaatttacctacatacttttcatccagttggttaataccttaacttaaccagtccccataactagccatagccctctaatatcaaggatgtcactggattaagatttttaaaaaatgtgcagagcacaaagccaatgtttcaatttgacgtcttgtgactagctgctgttttatccttccatgttttctccctcctcaaataatacgtttacatgtctttgcctccacaacattataaattcatcatgtattttcttcatctgcacacacttgatataggaagcatccagcattgcacatgaaataatatgtaaggcagaatactcaaggagttaggattgacttgatttgggctgtgacttagaagctgagttataaggagtcattgcaatgttctcctttaaagtattttaacatagactatgcaaaattatgcatgggcagttagtttaagctttaactttatatccatccagtcacccaaaatgagaattcacattggaaagggtggtagatggagatgggagtgtggatatctagttagctatgtcagaggtaccatacccaatgcggttactatcagtgctctgttacccagattttggtcaacatccgaggctttgctagatagcatagtgatgatgcaggatctttttctccttagctcagctaggtccgggttcttctctcacaaccaggaaaaattagtcatgcgaacactcgaagagtgagtgaagtagaacttattaagcaaaaggaaagctctcagcaaagagaaaagtcctgaaagcaggttcctggttgtccccttcacagttgaatacaagggcttttacatacgtgctgatggggctggattccctagttgtataaggtgcgaattccttgtggctctgccgcattccttcagtgcacatgcaggcccttagtccactgcgggcatgttgcgcagggcaagccccctgtgcaagttcccttatctgcacaaaacacgggtcggagtttctccgggaacccttcacttactgtctgcctaaagcaagctggctaactcctttgagtgatattagaaatactcttattggtgaagatgatagcttgttaattagcacaacgattattagaaatgcattctcattggagaaatcaaagcattcaggttttgtgtgttggctaaaatattttagagacacccactaccttccattaccagggcatgaacatcttacaagattgtcacacgtacccttagaccatgaacctgaggctgggtcactgaccttggcttaattctctgacttgggagcatttctagtcttgcgaggataactgagagtaactgaatcctgcctctggtatgtttttgtgtctgtcttgacaaaatttgtcctataaatgtgatgtttatagttcccaaaagagagctggaagttcatttgagtctatggaaacgattgcgtgaactgtgttgagcctgcttgccaataattatttattgaataaatgtccatgcgataggacaaatttggtttgagacttgcttttcttacagcctggaaggaacattgtgagagaatagatacattcttcaccaactaccattgtctacaaatagaacttgtgagttggccgtacctttaggccagttctctatacatgtaaaaataatagaccactttattcatcaaagtatgaatgaaaagattagacttcaaataggcaagtacaaagccctgtatctggacaatagagttgttgctttaaaggaaaaatttcttttaagcctcaggaactatctagggaagggtggaagaggaggatttcgaagattagctgatggccacattaaaggccagagggcagggactggaatgcccactctggggagacagccatggtggagaatgtggagatggagtcgttttgaatccagtggcaatgaagaaaagactttggttaggaaaaacgagtcccattgcaattatctttgcccataaggaattgtgacttatttccttcccttaaatcaataccagaccagacccaaatgccagcaagcacataacagcagtgacccagcaagcagtaggacagtgcatttaaggacagctccgtctggcctgaggaagcagcagttaaggttcaagtcctgtcttatcatcgttttcccgttcctcatttccttttgtttgagactggaggtcagtatctaggggactaaggcaaatgacacacaagagattttgttcctgggtgaacacctccttgactaaccaaatatttaactgtctattttcatctctggacagcatagtggtaagaatgggaggtggttaaataaggaaggatctgtcctctgctcgttcttccctgttacaaaaatgatcccacattgacttcccttcgctccaaattaaactgctctatttctcattcaggcatcataacccattgattgttttagtctgccaagggtactgtaacaaagtaccatagactgagtgtcttataaacaacagaaatgtgtttctcatagttctggaggctggaagtcggagatcagcgtgccggcgtggttgggttctggtaagggcctctcccgggttacagatggtcaacttctcattgtgttttcatgtggcaggaagatggtagagagctctctggagtctctttttataagggcgctaatcctgttcatgagcactccttatgacctgattgcttcccaaaggcctcacttcccaaaaccatcctactggggattagggtttcaacatgtgaatttggggaggacacaaacattcagttcattgcactaatctatcacttcgcttctgaatatatgttgtttgcagtttcaggagggaaggtgagaaagactggccagccccgaagggagggagataggggtggtatgattttaacaaattgaaaagaatgatgaacttccctgcaggccctggctgttcactttccagatgcgaaactctccaccttaaagtggagcccagagcagtaagacaggtcattggatccggattggaggcaaatcagctgaatgatgtgggaatatacgatgatgcatgtttgacacttttttccaacttctgtggcagatgagcctgcatggcatagtgagtctgcaactgtgaactcgggaaatcctgtaccttcccgtgcagtcgctccccagccatgcaggtatttccagagcctggagatcccagactacctttcaaaagaatgaattccagacccagagagtcccctggaggagattcatggcaagcagccgtacgaaataacagaagccccagagaggggaagcaatttcctgcctaagtcgtccatctgtcagtggcaaagctaggactggaactcaggattctccatccctcttcccaaacctggcactatcttcctggctttctgggtctggagtcccatgttagaggccctctgttttcagagcaggactcattgaatatgtgtgctctttctactcaagtgcttcaaggatccttcctggaaaagtaagaaaggggtggtgatcctccatagatatggattgtcaattatctctgaagactagataaggaatgggggtggggaggtgttctaaaagaaatggggtctgggttgagagagtcaaagcacacaagttggcactgctaatttgctcatacctctgaggaacaaagttgctcctgttttctatctaagagggtcccctgtctcttcccattgtgtgttcccaggcctcggttccggaccagtgctgtcatggcctcaccatgtcatagaattcccatcatttcacttgtgactcccttcttcctaggacccgggcataaattcttgaagagttgatctgagtgacagactcccacgctatgccaaaaacggcctcttatttcccaatgattgagaccttttatttgatcaatctcatgtgctcactggaccccagtgataccttcacatacctgacacctcagggaaacacagcttccgttcaagtcaagatccttgctatactgcaaactcttatgaaacgtctaggagaattttcaggctcctttgtatatggaaaaaggtcagaatgaagctccaaattcttcagcatgtgtaaaaacttaagacaaccatattttatttttgttttattttttatttttttcattgtttttttttttgagacagccttgctctgttgcctaggctggagtgcagtggcgcgatctcggctcattgcaacttccacctcctgggttcaagcgattcttgtgcctcagcctcccaagtagctggaattacaggcatgcaccaccattcacagctaatttttgtatttttagtagagatggggtttcaccatgttggccaggctggtctcgacctcctgacctcaggtgatccagtcgtcttggcctcccaaagtgctgggattacaggcatgagcccctgtgcccagccaacaactacattttaaagcaactttattctcaactgaatgacattttaatcactttcttgcccatgtggatatggataaggatattttgccaatattcttgtttgtgtttgactgtgatgctattgttatacaaagaatgggcaggtggagctaagcagaaagagacagtcgggtacctgtaccatggaaaatggaagagagccaagcagactgcatccttagggggcagggaggtcagtgcaagttgggacaaagcctagctgagtcggtgagcacttcatggcagactagtcaaattatatctcttggactaagatcttcattaaaggcctgcacctcagagacatttcagcctaccaaggtgcatcattatggaagactgggcatgataatagtaatttaaatgaagttaaaagagcagtctaaattagaacaggtattcacattccaatttctcttgagaagagcctctgttggataaagaaaactcgctgagcaaaataaatcgattggaggtaaactttaccagccctggagtgcaaggtttagaaacatgcacacatcccacggtgttaagggtcctgctgttttcttccatgtcatttcatcacagaacaattttctacagcaacctgatctaccttgtggcccagtaaggcatgttttgttttgagatggagtctcactctgtcgcccaggctgtagtgcagtggcgtgatctccgctcactgcaagcactgcctcccgggttcacgccattctcctgcctcagcctcccaagtagctgggactacaggcgcccgccaccatgcccggctaattttctgtatttttattagagacggggtttcaccatgttagccaggatggtctcgatctcctgacctctgggatctgcccgtttcggcctcccaaagtgctgggattacaggtgtgagccaccgctcccagccaagcatgtgagagttttaaatcaaatgttaccttgtccctattagccttaccactgctaaatatctacacggttccctgttaaggagagtttctaaatgactctcttgagaaatcctggataaatggagaatggagcatttttcctgcctctaagctttgctccactgcaatctttcacatgctgtgtatccagagggtgactgccagatagcttcttgaagaaagggaggaggaaacggtcattttcttgctgcgctttctaacacccaacagaggaaatgcacagcataggtgtgtgggagtttggctgacttatggtaaaaaataaacatggtttcctgtttgtctcttgtttccattccttccttccttcatttcattcttattttcattcaagcggtgaggagtgactggtacttcctgccaggaataacattttatgagggcaaagaaggtgtcatttggggaccaaaaaatatcagtccttcttgcaggcttccaaaaattctcacctttcactcatcaatcagtatcattccttaaactaatgttgagtattttaacttgtgctaaatcatcctgttatttggaatgctgaaagactggcatcttgatgcattataattttctcatatatctgattagcttggagcaattccaagtgcacagcatattccattacccatttgtccatccacctacacacccacccacctttccatccatgcatccatccatccatgcatccatccagccagccatccatccatccattcatccatctacctacccacccacccacctttccatccatccatccatgcatccatgcatccatccatccatccatccatgcatccgcccatccatccatccatccatccaaagaaggaaatgagttgagtgttctgtgttgaagagacagacagtgcaaaggcactgaggaataacaagcttggtgtgttttgtttgtttgtttcttttagatacagattcttcccatgtcacccaggctggggtacagtggcatgatcatagctcactctagcctagaacttctgggctcaagagatcctcctgcatcaccctctcaagtaggtaggactgcaggcacatgctatcacatccagctaatttttaaatattttttgtagagatgaggtctcactgtgttgctcaggctggtcttgaactcctggcctcaagtggctttccaaagtgctaggattataggcgtgaaccactgtgcccggccaagcttggtgtagattactgagctgaagcatagtgaagtgtggagagaagaggtagagaaaaggtgggagggggaaggggagatggaaggaaaggggagaaattgggggccataccaaggagagccctgtagaccattgttgaagacttctggtcactttattctcaatgcaatgggagcccactgcagggggctttaatcaaagggatgacataatgtaatttacatttcagaagcatcactttggctgctatgtggagaatagactttaggatggcaaggatagaagttaaaggtccaggccgggcttggtggctcacacctgtaatcccagcactttgggaggccgaggcgggcggatcacgaggtcaggagatcgagaccgtcttggctaacacggtgaaaccccgtctctactaaaaatacaaaaaaaaaattagctgggtgcggtggcgggcgcctgtaatcccagctactcaggaggctgaggcaggagaatggcgtgaacctgggaggcggagcttgcagtgagccgagatagcgccactgcagtccagcctgggcgaaagagcgagactctgtctcaaaaaaaaaaaagaagttaaaggtccaagagaaaggtagcggtgctgatggagacaaagggacagattgaggatgtggagctcatagggtttgctggtggaatggacatagagtgagagggaaagaaattaaccaacgatggcttccaggtgcagggtttgagcaatcggttgaacactgacatcctggctgggacaacaaacactgaggggtagtcagacgtggggagcagggaacaactaacagctttgttttagatactgaagtttgcagcatctatgaaccctgtgacagaaggtgcctagtaggcaggagcatatataagaggagtccaggagaggtcaggcaggagatagacatttggaagtcatcagcacatggaagatatttaacactgtgagactacaaaaaataacctagaaaagagtgttgatagagaaggaatgctggagaactccagcatttagagattagtaagaagaggaggagccagcaaagaggaggttgaagtcattatcagatcagtttgtagcttgtgagcatagggatcatgccccacaaacaggagtttttactgaggcttggaaaagtctgatcttccatatcagaaatcaacattttgcaggtacattggctattagggcttttcagctgaatcagttactctgcataatatatatcctgcatggagtaacttaaaagttttgggaagcaggaaaaagatatgatttctatggtccttagaaacattgcctagtgatctagggacctggagaaattccacattattgaagtcaagatgttccatatctattctctgtttatctagttaggtcagtgcagtggtaagaagaagtcgagagcctggattctggtcttgtcctcatcatctactagctgggtgacttcgagcaaggtgattaacttctttgagctttccttccattaatataccatattgagttgttagcaatactcgtaggattttgtgtgtgtgtgtgtgtgtgtgtgtgtgtgtgcatgtgtatacgtatgtgaagaatgctggagatagcgcatgaaaagtacttagcacatggttagagctctgtaaatggccatttttatagtgatagttattgtatccatcttcttcccttcagactctgttctgctccacattgtgctcatttcttacttttatcaagattttcctccattttgcaatgttttttctcctcctttctgcctttccacttcctaccagtctcctcttccatgtcttttattcaaacatttttaagcttggcctgtgtgttaagttctgtgcctggaaatgaacaccataaactcttccctaattatctcagcttaccatctatcttccacccattcagccacccacccccccgtccactcacccatccatccgtccattcaatcacccacccatttatccatccatccatccatctatccatccacccatccatctgtctgtccgtccatccatctgtccacgtgtccatccatccatccatccatccatctgtccgtccatccatccatccatccatccaaccatccatccatccatccatccatcccctaggtatttttttacttccaagtgattttgcacaatctaacattgatcttacctagccttgtgacttctgataattccaggtgtatatattagctttctcagtgagactgtaatttcctgaatgggaggagaacatctaacacttaaaaaaaaaagcctcattagagcatagagcaaaaggccagataccgaatgggcatgtaatatattcatgttaaaataaaatgagaactggaaaatgatttgcccagcctggctgggaaagtccttcatacaaagtcctcctcggtttccctgccagactgctgtcatgtggctgttttcagactgtgatttacgagatgggcagaactgcgtcaattatgcaaatcacacagagctccctaaggaaaatgcctgccaatttcaggggagtctgcccatattcatttatgcttgttgaagctttttaaacatcccattggccctctgtcacacgcacattcacctctgagtcaccttgtgctgtctctagtgtcttctctgctcgctgataatagctgctgtattagtgcaaaaccacacccaatttctaaagcttgggtgccatgttttttttcatccacttctttaccagacacttaatgagatgctgttgaggactaggcatgtactgggcatgggggaatatagtggtgaataatacataatcaccactctaggaaatcagagctctcaaggcagacaacagacaactaccattcattgtgataaacattataaaagtggagcaaaatagagaggaactaattctgcctgtgagttggaaggaagcttcccagagaagatgaaagataagtaggcattccctaagagataagaaaagaagaaagaatcaagacagagggaatattatatgcaaaggcacagaggaatataagagagcaagacattcaatggccaagagatggttggtgtgaagggaagggatgaatgtgagaggggggatttgaaggaagtgggtgaggagaagcaggagatgaagctgaaaccgatgaagaacgaccccgtgtaagatgatcaggattgtggctctcattgtgtagaggcaatggggagccatttaaggagtgaggacatggtttcatttgtgttcagaaaaatctctctggcagggggaagagttattgggctatggtaagtgcagagcagagatgatgagggctaaaactaatgtagtggaagatggatggggatgaagaacataattaatttgaaggatgcttagaaggtaggagctatagatggcaacaccaaaagtgagaggcatgaagattgatcccaagatttctagtaccaatagcttggtagatggcagctttattgaatgagttggggaagatgggaaggaatcaaactttggagggaacgtgatggtttgtgtttgtgacatgttgaacttggagatatccagtcaaatctagaactcgggaatagtatgaaactaccagtgctgttgtttctgggccttagaacatctctgtcctttactttgcttatggatcaacaactttagagtaaaatgggaatctttatcatcttgagtttcagcattagactagtttaagttcaaattttgtcactctaatttaccaatatcctgcctttttttttttttttttttttggtgacagagtcttgctctgtcacccaagcttgattgcagtggcacgatctcagctcactgtgacctccatctcccgattcaagcgattatcctgcctcagcctcccgagtagctgggattacaggcatgtgccaccacatccggctaattttttgtatttttattagagacagggtttcaccacgttggccaggttggttttgaactcctgacttcaggtgatctgcccgcctcggcctcccaaagtgctgggattagaggtgtgagccaccacacctggccccaacatcctgactttatacaggttaacccacagctaccagccagctttcacaacagaaaaatggggcctgttaatatcagtctacagggtttgtgataattcactgagatgtggagacactataagcaataatcaggcagtgaagagttctaaaaagataattctaagcactcaaaaaggctctgcacagatttagctattcccaagtttctccacttaaaaaaaaagtccaaaagattattttgggaaatggacttaggcctggaaatgcatttggcttactaaggccctgtttcttcaccttaattatttttggaggaaggctgcagattccaaaggacactgggccatgagactcaacacacatgttctctttcctggcatttgagaaaaaaatttttggaaaaatccccaaaacctactgtccacacagcagccctcagtgatcactgcaattgctcaattgtatggttattcacgaggcgcagattatagggttacttagctgaagtctctgtgactccaccagataaaactaaattaaaaaaaaaaaacatgcaaacgctggatattttctgagcatatggcagcatttagttttagtcagcaagaaataggaacaaaacaaaacaaagccaaactgtgagcaatattttttgttctctttttctgttttgttttgcttttcaaggatgtggatatctgagacccaggcttggttatacagaacaagcctcttttgaaaacacctgatattaataaaatgataaaagaacaggctattcgcaatttttatggaggccttgcttcaaaagtttgttgctagatctgtattttgaaacttggaattcaggtttgcatagagatggtaatttataggtctccaggccagcctgggcaaataatcctgttctagcaaacaccatcatcctccatcctgttgttcaagctagaaaccaagaagctattttgaaaagcatctgctcccacctgttacgtccactcaaaccacacattttgtccaccccaaactcatcatctcctctgcctccaccttggtccaaggcttcatatctcttgcctgaaccatgacattagtgtcccaactagagtctcttatctctgatactctgatactccctccacgtgatgggtagatatgtcttttttttttttttttgagatggagtttcactcttcttgcctgggctggagtgcaatggcacgatctcggctcactgcaacctccgcctcccgggttcaaatgattctcctgcctcagcctcccgagtagctgggattacaggcatgtgccaccacgcctggttaattttgtatttttagtagaggtgggaccatgttgatcaggctgatctcagactcccgacctcaggtgatcgccttggcctcccaaagtactgggattacaggtgtgagccaccgcgcctggccaaatatgtcctttcaataggcactcccatgttaaaaacccttcattgggttcccattgcctatggggtaaggcctgaagtctttggcatggcttctgaggtcctctgcagcagggcctggtgcctcttcccctcacctggtgcctcttccccgttcatcgtctcctattctagccacataggccccctttcagtttcttgaaagcattgtgctgactcaccattgagacgtcactaatactgttttccatgtctggtagatgcctgctctatgattgactcatgtctatctcagtataaatgtcacttcctcagggaagccttccctgattctccaggtaaagctgttttcctgtggagattgttcatgaatctgttcttcccactaaacctctaggcttgaaggatagtgtaggtgggtaaagtccatatctgtcttgctccctgtgatatccctcatacctgtaccatgcctggaacatgacagacactcactcaaatatttgccaaatgaatgagtgtgtccgaggtgcaggcacttgtgactgtacatgacgttatgtccatgcgagaggtgctcagagtgccactgcccccaatggccacagggctttcccctccccacagccaccccactgggtgaacagtcaggatagagatggcatcaggccaagccatggtggtggctgccacggtctgtaaccggcatcccagcggggcagggggtgggagggagccatgacctgaggaccacagagcagggcgacaagggctcaggtaatgggctgagaacaggtagcagggagggtagacagaggactccttgcaagcaaggacactgtcatgcttggtgttttaagcccagagcctggtccaggcccagagagtgggagatgcacaggaaatgactgctgactacagacggagatgaatgcagagtctgaggttgggggggccccttcttgcttttcctttttcccaatccctccctgcctcactcccttacctgttacccctaggacccagagtcccctgcagatgtaggacaggggcaggaaaccacagatggaggctcatgtcagagcatctctccttctggctcaggcccagcccagtttaaccaggatcactaatttctaccttgaagcattttgggagggtttttgagggctgttacgaggcgtgggccacatccatctttatccagtgaccttattggaggtcacagtgcaaagcagatggggaagtttaattaacgtacaataagaaagtcataatttctagaattccaaataaaaggtatccctgatccccacaaaaatggagctgagcccattcctgtgggctttagtcttgcttcctccttgcaaatggcaaactgcaggctcttgattttacccttaacagtggcccttgcctagcagctgtgtctctctgtctatcctcaggcctggctctgggcacctatcaaagggcagtgcttttctggtctgggctgtagggaagggtgagggccctgctcttcatagtaggaatagcggcatgggacatcttcactggaagggagaagagtaagtcatcagagagacaggcacggttgccaggttggtgtgagggaatgattctagaataagaggctgctttgttggatttcacagccccagtcatgtctctcacctctctacctgaattcattacatatacatgtacacacacacatacttatacatgcacaccagggtcataagtggcagagcttcagcctgaacccatcttccagcttttgaccatacaggactaactttagcttgctcccctcctttcctctgatttttcccctcctatggaacttgcccaacttccaaagctctagcatcttcgttacagggctcttaccatggaacctgcctgccccactcagctgccatgaggttaatgtgctcacttttatgtcttagctctggaaggcagcagtcaaaattggaagaacaaagaaagagatagaaataaaatgaatttgtatacatgtatcagcatgtattaattattcaacaaatgtattggattttattataaaaaaagaagaaacagtggcagacgaatccattagcgtttattgtaggtgcacaggctgttttaccaagagaactgagaaaagaacacagaacaaataaacttcagggagggtggggtaagaatgtgtgtggtggttgggcacaaatgtgcaggattagtttttgctgatcaggtagagagagggaggtaggtatatgggagcactgttaaaatatcttgaaacttccgttttttcatggttaataatactggattattatagtggaacaatagtgtggattaaaagaggtgaatccgcaaaagcttttaacatacgcatggagcaaagtaattactcagaatattttggctgatacaaatattactaattttcacttctgagttcttactttcctgagtcctctgagtagaagatacactttttttaaaatgtagatcttgctttgtgtaattaatgggctcctgcaaagctgtatttaccttgggtctactgtcacttgtgaaactaaattgacagttcttctttttaatgcttgggcatgtgatctaagtgttggaaatctcctctgtgggtctcaagcacttgttggtctccattgaactttgctggggttctggaaggctattccttgtctaaaagaaaacatgtaggtaggggaacactgatgttaagccctcattggcacctgtatggggccaactgtatggaaccttccctccctccacagatggaatagagcagctcatggctagaacaataggagagacagaagttatacacaaactgccaggtcgtgcacaaggtatgcaggctggtttctgaatacagatgataaattagcctgtgggcaggtagagccgtgatggggatgacactaggcagatgccaactataggtccttctaggaaggtgtcttagttcattttctgttgcttataacagaatacttgaaacctggtaatttataaagaaaagaaatttatttttcacagttatggaggctgagaagttcaagatcaaggagccacatctggtgagggccttcttgctggtggggactctgtagagtcctgagtgactggcatagggcatcacatggctagggaactgagcatgctcatcatgtcctcttttcttcttataaaactaccagtcccaccccctagataacccatcattcccattaatccaattaatccattcaggagggcagaccccatcaactcttaaaggcctcacttcttaatactgccatatttggaagtacatttcagcatgagttttggaggggacaaacatttaaacaaaagtagaaggaaactagataagtctttgactttctttgctggcaaattaatcttcgagaaggtaaagaaaaccacacggagatcttctatctggaacttaaaccagtaaggaaaaactgattgggagcacaaaggtgagggaagctttgggagaaaataacctcactgggcaggcagatagcacagtggtaagggcataggcactgagatcatgccccatggtccaaatgctggccctgctacttatcagcgacattcctttaccttatcgtgtctctgttttctcctctgaaaaatggggatgatagtagtacctacgtcatgtcatggttgcaaaaatcaaatcagtccatttagtacagggcaaatattcaataaacattagctgttagtatgatcgttacttgaattcatacttgtgagggaaagtttagatggagagtcatgggccctagactttagggaaatctaaaaaataacttttaaattaaaatttaactaaaactttaattttttaactaaaaaagtcaaagataaatgaagtagaaaacatagaggggattttggcctaagacagttcagcaagctttttctgtaaagggccaggtagtaaatatttttggcgttgtgggccatacgctttctatggcaactagtcagctctgccattgtagcacaaatgcagccgcagacaatgtgtaaacaattgagcatgactgtgttcctataaaactttatttataaaaacaggtttgtatagtttgtggacccttggctgatgaggaatgggaaacaggaaaatacaaaattctgcctgtgtcattgtaaatgatgacagcaaattgaaaactaacaaggcaattattaaatgagccaacatagcttcagtgggaactgtttacctcagactgaaagacgacacgtgccaaaaagtagggaaattgtggtgtcttccgcgtatcatgtagttcagaaataaatatgatgatgttaaaaaaagaaaaaggctaagctttccatgaatctagtaaaaaggttaatgattttcttaaaaaagaatgaataggttttatttttgttttggggggttgtttagtctgtgcagaagtttgtagcaaggggaggatgggcactcgcctgggtacagtgttgtaatgcaaatggatgccatagcctctgtaaccgtagcctcctggaaggggacccagaagtggaccacaggacctggaagtggaccacaggacccagaagtggactggatgatcctttgagagttatggggcaatggttccaagaagactccctaataaaaactatggaaaagagttctcagcccaaagacaacctcaacactataaatagggacaagagattgaaaaaaaggtctgaaagttctcagatgcaaacacaacttatttctaaatggtaagattttgggtaattattttcttgttatacctttcagcaatttttattattggcatgtattacttttaaatgtcaaaggaaaataaaaactatttagggtggagccaccttctcagaggtgtagtgttgggactgatgcttagaaattataaaaaggcagattttcactcagcataaataaaaatttctcattgtaatgatctgacatgcaaactactgaatctcccactgggggcagatattaatcgcttttccatcagccattttcttgctttcttttcctgatggtagaactagcctcccagtatatgcccagtacttgtttttccagcttcctttgtagttagggaataggcgagccaccctatcctggccaagaattgctgggaaatcttctgagtggttcctgggagatgttctccttctttgtgtgtgtgtgtgtgtgtgtgtgtgtgtgtgtgtgtgcatgtgcaacatgaggaaaagcatcaaccttccagtgtttgatgtaccctttgagcatgtggtttttggtgcagtggcagccatcttatgaccatgaagagcaaaacctgaggttaccatccagtactctgaggatggtagaacagaaaaatgcaaagagtggggtccttgattcatcaaaatataaccatctcctcagcccatattcacacttctgaggaaagtgtttttattgaggattcagttccaattgtattgcaggtcctaatttatttcaccttctccgaaatgttcacacagaggcatgatgctggtgttcctccagttatctaaatgttgtcaagtttgaaagtgtctcagcattcttggggccatgggctctaattgttttaatgaaaaaccttgcagcaaggggtcagaatgcagttttgcagtgtttatttcatgtcattagattttgttgctttaactgttgcagggaataaaggcgttttaatgtggctcactgatttctttttcctgtggttgctgtcatcctttcacaaatccagctctgtggaagacaagggtcagtcctggaggttcacatcagtgaggcatgaagtgtccattctctgcatgtggtgactagtgggcaggtctcagggaagcaccaatctttgcatgtcctatgaggcacagaataatagcaataaaatagagcgtggggattggaagcacctgttccacaataccaggttcaaatcctggttctgccagtgactaataagaattcggggcaaattacttaacatgtctctgactttgttttctcattataaaatgtgtatgatggtaatatggtggaggtcatgaggatgaagtatgtgtgaagtctttagcgttatacctaatatgtagtaagaactctatacatgggtactactactcacaatacatgggacaactgctgtttccaagtgtcactgtgactgggagaaaatgtctctatcgggataatttgttctttagcaagaccttctggagttggatttagcagatggcagctcaaatttggataaccctcttcttgtgggtctggcaactcatggagctctttctctcattcacatttaattgtatttgtgtttgtagcatgattttggcatgtgactcagtttccctagcagatgagaagctccttgagggaagagttgggatttccattcttgggttctcaagaatgcagagctctgggctgcgcacatgcacatgtgcaaggaatgttggccagggattgggtagatgggcagcaactacctgtgatatgaagaattggggctagtttctagaaagttcagagagcagtggttctcacacttggctataccttggagtcactgtggatagggtgaccaaccatcgtttgcccagtttccaaggacctgggactttcagttttaaaaccaggactttcagtgctaaaagttggaaagtcctgggaaaggtgtgaaagtaagtcctgggaaactgggatgagtggtcaccctaccagtggaactttaaaacatgttgatgtgatggctgggactcagccccagagcttaagatataagctgtggtctagggtgaggcctggacattagtgtgtctaataacccaggtgattttgatgttcagaaaaggatgagaagtgctgatgagcaggagctcctgacagggttgcagtgcacatcgttgagctgtggatgggttacagggggctaacaaactggctcccttcagactcaagggcactggttgtctagccccattagcaaccttctcatttcactccagtgtgccttccaaaatgtgccattttctgtgtgtgctatgacatgcacaaggttgggaagcactgactgagtaataatgcataaaggtggtgaatagagagttattaaaaaagggaatttaaaggccccactcaagaccatccaaagtggaatgactacaagcctgggaatctgcatttgaatcaggctttccaagtgattcacatgcatgctcaaattttagaatcacaagaatgtatatatagaaagtatagcaaaaacataatagtaatagtcttaaagaaatgaacttcagaatagccctgcctgaattgacttgggtacagaaaatcacaggtgagacagaggaatgggaaccagaaccattttcctttatatcacaaaaacctcccttttccccagatctcctcctctccttgaaatgattgtgtctctgaacaacacagctgcagctgtctgctctcagatttttccctaaacctcaggtcactgaccttcagtgggctagatttagtctcctgtggcagatgagattattgttctcagctcttgactttcttctgctctgtgagcttgcagtgaacagaagtggaagagaatgcttctcaccttcttatgactgagaagcattgatatttgctattgcaagccactcagttttagggtcgtatgtttctcagcatgattgcagccagaactaattcacttctcaaaagataaagaatttgggttgccactggtcccaccaaaagacttcaaaacatattacaaaagaagggctcaccatggtggtgagggcttggaaaggggtgaagaccagccaagactgatagtacttgtgcacgtcaatgtctccttagagactgcggcgctccttccagccggctagtctcttctccacctcttgttcatgaagcgctggaaagggccctgctggggcagacctgcagtgcctgcagaggagccagatagcatgtggttaccaagtaccacgtgcccactccaaggcaaggtgtactttctaaagcaggcggttcttgttcatgcctctcgtttattagtggacttccatttatctttcttagtcttctgtaggcttggggaggcagaccaaagttttctgtaggcttggggaggcagacacaaagttttctgtaggcttggggaggcagacacaagagccatccccttatttgctgctgggaacctgggactgagctctagctctaactgtgccactcactacgagaccttgcctcgtcactcatctctgcagtgcattattgattaagatctttttatagccatgagattgcatgatttacgttaaaaaaaggcatgacgagaatgtcatgggttgagagtcattcttcccagagtcaggaggtaggatctgatgtgtgatgaggggtcctgtcttgcaattctcatcttgcctctattagaaaccgagaagcaaaggaaccccatttgccttccactaggaaagacaccaacatagggtgcccagtgaattctgccaaccaggaagtcttccttaacaatagcctcctgcccaggacaggtctacaggttggtttatcaacagcaactcctgtgcttggggccacagctccagcagcaccagactttggcttccaattgctttgaccccagatctccgctggttttcctagttcctgactatctcactctcaactggtttctctcttctggtctagctcatttggactgacaacagaggcccaaatttggcttgtacatcagtttctcccttggagctcatacctgctcttgttctgtccacgtgtggtcactgggagaatgatgcccagcctagattcttgaccagaaaaccttcctcagccatgcttgaccatccgccttgtgttcagaggaggctcagcaaatgctacctctacccacatcttgacttattttatactccacacagccaggggtgtggttggcaactggtggttgtggtgaatggattccagcttctgatggccgagcgtgccctcctttctggctgagacacctgggagggtgggggtgtgctaaggagtgggcagctggacacaccacaagaacctcatggcaattagggagttaggccatttcctgcctcccacacagcaggaaacaaagatgtgtgttgttttatttcttccagcattgaccataaagatgccagacaggaactgagatagaagctctggaggcaggcaggagacagaggagctggcaaaaatcagaggtcatcggggacttcagagatcaaatatcctccttctcagatgaggaaacttagacccagcaaagtgaaagcaagcattttcccaagggctgtcactctcttgcatcaagtttaaattaatttaggcagcgtcaggttggagactgggttccaaaaaaggtagtttccagagttcaccttgaagagcagcagcttgatgccagtggacctcaaaggggccagcccaactggtcattctgattggttcagagctgacctagtgcagagctgtgcctgcagtgaaacatgagagaggcctccatccctggacttctctggctcttctctttctcctgatttgtcatcttgcctttcttcagaagagtcaccatcgtcatcaccaccatcatcaccatcatcacaactatcatcaccatcaccatcgtcatcatcatcactaccatcaccattataattatcatcaccctcaacatcaccatcaccatcaccatcatcaccactaccaccatcatcaccattatcattacatttttactataggagctgaagcttgcatgtatctcttcttctggctgtatcacccactgccctccacccattgctctcctgcctcctcctgcctaactcctattcatctttcaggaccctaatctgggcttccaatgaagtgtcacctctactgcaggcctttctggcccccaaatcagaattagctcctcctcctccgggcttccacaccatttacttcaagggtctgtgtccccgagttgatttattgcttgtgtaagtgatcaagtagagatacttaataatgtcccactcagactccaaggtccctgagaacgatgcctgcgttttatctttctacatgaattacatgtcatgtaggaagtgctcaccaggagtttgtcacattaaacgactaagttttgaaggaggacgtttctggattttaacataataggaagaaagttaggataataccaaacttttccaaaatgcctctttcacacaaagcaaaatgagcctagtaactacaggataaggtatcaggggatgagactcataacagcgtatgtagtcaacatggagcagaaatttagggtatggaagaggaacaggggtgcccagggggttggaaaaaatcattaggaatatcagaaaaccgttcgattttaagaatttcttatttttttttctctttttgaggattgctggagaggtttattgtgcattatgactgacttcaagggctttgtttctctccccgagctgcccttacacggaggcagagaggtgacgggggtgggtgggggtggtgagagtggggatggtggtgaacagaaaccccttactcctgcttttttggtcttggtctatcacaacaccttgtttactcagcccacccctgtatagggtacattgtcacttctcagtctgcaaaggataagagataaaaagggatccttgaaagacttacgtcacgcattaggaagctctttgctattggagaagacaattcccagcttcatcccacaggtttgttggtggtcagacttgaagagattaatggtggataaacaggtcccagggaaagtggcagcatccaatctgttgccaggaagcagggagagaaatgccacaccgtaggattccatatatggcactcacttcttccatggctagattaggggtgcctgaccttacagcataacaagaaagaggcttgtgcagctgagaaggaagcagacccccaacccatagccaagaatgaaaactctggttaggagataaacagaatctacctgatattctgatatgcttttctagaagttctgagaatgtgatgaacatggtggaaaagtctctttgccaggtgcattattggtaagttgctctgctaatgccacatgagttgattctcattgtgggggttttactgagtggagaagataattaggagctacaataggattgtttaattagataattaaagaataaattatgtgaccctctcatttttctgtatgtgtacaggcttattattattattattttttactttagtgcaagggtcaatcaacttcctcttaaaggaccaggtatcaaatattgtaggcattgtgggccatgtggtctctgttgcaattatacaacacagctgttggaacacaaaagtaacaatatgtgaatgagtaggcatggctgtgtttcaataaaactttacatatgaacactaacatttgacttccatataatttccatgtgtcaaaaaaaaactgttcatttgatttatttgtcaaccatctaaaaatggaaaaccattcttcactcacaaaccatacaaagtggtagaacaaatttggcctgtgggctgtagtttgctgactcctgtcttaggggatgcctcagtgcacctcctgttgtaaggagattggagctagtttccaagatagaaatgagtaattttgaagtttccccagcaatttcaaaatccattttcaggctagataactggtccatgataagtctgaaaagaaacaagcctggacttgcctgcctaactccattatgaaatctgtggcttccagggaccttgaagtcttccaggtcatattctagactttatgaccacatttaaaccaacttagggatacacagcccctgtctgttagaggaaaacataccttaactcctagagtaaacaatttcatcctcatgtcccttaagcactcattttcacactggccagctttcaggggtgtgatgcaatctgacttcctaatgttgtggatgagtagtgtaatgtaatgtaatgtaatgatgtaatgtaatggagagagttgtttattcccctacacatatgcaccaaaggggtaaataatggcgactctccatttctgggttttatttgacattttcctctactgggccagctatgaccttaggtgtggatcatttccttttccctagatggaaggagctgatgttatggagaacgggggtggtgtttgctgatgtggttcctgaatgtttccagcagcccagagtgaagcaccactataacagaatttaaaaatagagaataaagtaagcttaatgtagcagttttctcaagacaccagagtaggcatttaaaaaataactcaggatgattctttctggagtctgccaaggcgctgaattctgagaccatggtgggattctgatatttaaaaaaatgttcgttggtgggggtggggaggtgatggactggcatagtttagtgcagtatcttgtatctagtaggctctccataaaggtttactatacaaatgaagggggtgagggtttaggagagcattttgtctgaacaggaattctggtttccttccagctgaactgcctcttgggttgcctctcaggtctttgtagaaacatatgacattctgaggagtggagagaagttcccctttggatcccaggcaattggcacgtcaaatccagtcttacttttatgacaccagagtccacacggcttcctgtttctaacagctgctactggctcagcattatctcaaaagaggaatccagcttccttggtttttgccaaagcccaaatcaataagcatctgctttctgctgcatttgcaattggccctactggcagcagggaatgttgagcacgtagaagccatgagcccccacctagctcaggacttgttctggattgtagagactgttcctttgtaggggagaaggaactgggggttcggaggggtgggagaagtggaggctggggctctgtgttgccctgtttccttgtgagataactaggaagtctgggcaatttttaagttcccatcattaattacaattttgttttttttgctggggggagtgggcggagaaggaggggaagttggaaaggggttgctctctggaagttatgagaccctggaaagagagaagacatattcaaagaaaattgagacaaatttttttttttttttttttttttgaggcggagtctcgctctgtcccctgggctggagtgcagtggcaccatcttggctcactgcaagctctgcctcccaggttcacaccattctcctgcctcagcttcctgagtagctgggactacaggtgcctgccaccacacccggctaattttttgtatttttagtagagatggggtttcaccatgttagccaggatggtctcgatcttctgacctcgtgatccgcccacctcagcctcccaaagtactgggattacaggcatgagccactgcgcctagccaaattgagacaaattctaaagattgtttataacctcaaaattagttccatgcccttgatgccagaagcatttctcctctggtacagaaaaggcaagtttgcatgttgacattagactctagtctctttaaggtaaaattcaggttctactgatctttgaagccttggcatccagcatgaagcatgacatagagtaggtgcttaatacttgtaggtgacagagtgaacatcagatgagcaagcagaatacatgctgagcaccatcagcttttctggatatgtgggaaatttaatcttttctcaatacgatcccagcctttctctacccagagacaagctgttatctgcaaaaagtagcagaattacattcaacatccagacctgcgatagtggcttgaaaaggtgtgcgacgtgttgaatttcaatccctttgctgaaaataaatggaaaaatgtgttatcgctgctcgtgtctctttggcttatcatgtctttaacagttttgttaaaaagggaattcagtcttcagaccactgggaaactatcaagctttggctagagcaggaattttcaaccctggtggtatgctggagcctcctgaggggtttaaaagaatcccaacacacaggtgcactctacaccaattgcatctgagttttggcaagtgggatcctggacaagctctccaggtaactcagatgtgggcagcctaggctgagacacccctgagttggcatttacccatgctggagcactagcgccaaatagctgctcctccgattgcaaaatagcagtcaaaccagggggctctggagagtggaaataataatcctgtggattacagtatttgattacagtcagcactttttatttttggcagtggttccaacaagtcaagcaaaccctgaatctttatataaaaaagtcatttagttggattaaagctttattgctttttgccaacttttgaattgggtggaaactattagtgctagagaaatgtcatgatttctttcagagcaaggtttgtgttacagttttccgaatccccagctcctagaatgaggcctgccatgtggtagctagtcaaaaacgctacaataattacagtagctgctgcttgctgggtacctactgttacactgaacacctcatgtaatcttcaaaacaaccatatgaggtaggtcctattagtatcttcctttaggaaggtgaagaaggcagaattctaagacgatgccaacattctgccccctattgtgcctgccctatataatcccctctccttgaatgtgggccagacccatgaatatgatgggatgtcgctcctgtgattatatgatggcaaaggtgaagaactcttgcagatgtgactaagtttccttatcagctgactctaaagtaatcaaaagggagcttatcttgggtaggcctggccttatcaggtgagccctttaaaagaagtgttagagattggaggcctgctaataagcaagtcaccgtgagtactaatgctgtaaggaaatagattctgctgacatcccagagctccagataagactctgagtaagaggacttagctaagacacccagattcccaacccacagaaaccatgacataataaacaggtgttgttttaagccactaaatatgtgataatttgttatgcagcaatagaacactaatacaccagtggaaaagtcatgatacagagaggttaaagggcttggccaatgatccacattatgagctggtggagctgggagtgaaaccctgacatttctgaccccaagctgtttaatcatgtcaccatcaccaccatttatttataaaatgaggctcatttgcactagcccactggctttctgaaagctataaactgggacaaaaccaaggtggattcaaagtcttgcttgctttgtgcaatgatgtggaattagaggcaggagctgccagcatatgccacacatgtggagggtcagggccagaggcgtggaaatggtgtcttttccagatccacactccaagctgtgcccccaagttggtacgtatgtcagtcgtgaacaagagaaggactgaagaaggctgttttaatcacaactgggacctcaaaggccaatttactgaacatcaaataaaccttaagaaagaaagagatggggctgtggtcgcctggtgacaaccatatctgctttgctccagctgagaggcgagggtgttggcctacatttctgatcagatccagaatttaaacatcataattatacagtggtcctttcttaaagaaaagctaagctttactttcattagtaatgtacattttagtccagcttttccattttctttttttcttttttttttttttttgagatggagtcttgctctgtcgcccaagctggagtgcagtggcacgatctcagcccactgcaggctccatttcccaggttcacaccattctgctgcctcagcctcccgagtagctgggactacaggtgcccgccactatgcctggctaattttttttgtatttttagtagagatggggtttcactgtgttagccaggatggtctcgatctcctgacctcgtgatctgcccaccttggcttcccaaagtgctaggattacaggcatgagccaccacgcccggcccagcttttccattttcttaaggagattgatagagagaacttttaagatttggttattctcagactggggccacatgggctctcttgcaggatattggctgtgctgggtggccaaagccagcttttgtcaacagaggtgtgtgttcttgtgttggcttctaaatggttcctcagagaggtggtcaccaccccctctgtcatcttgtgcaaaggccatgggtgtcctgcaccagagcattccataggtatttataagctgaatggtgctgtgtgagctccgatgagcaatgtaactctggaactgcccacgacgtggactttgactcgaaggtagttgaaccctactctaccctctggcagctgtgtaaccttgggcaagtcacttgacttgtcttagccttcatttcctcttctataaaacagggataataatgtttgggcggacctcctactcagtatccattctcctctcttcttcagtaggaggagcctaactgtgggatgaagttagtgtgctctaactaaaaccatttcattgtcttgatgctgggatggctgtaagacctatctctggctagtgagaagtgaaagtctactggtaaagaaggggtgtcttggaaagttatcattttcctgtactcagctagaatgttccttttcattttccctttacctgcatgtcctcttcctacctggaatgtagatgtgatgtcctgaggtgagcagccatcctgtgagcctaaggataaggaggagcagaaagctatgaatggtttgggtctctgatggcatcatggagccacccaccagcccttccctgccttcctttggacatcttaacacatggtggaaatatacttctctttctattggtgatctttttttttctttttatcccttcaggccaaatgcaattctagctgatgtaaaaacctgcctcataaggtaccttcccaaatatttgaaaatactcagtgagccatcagatgttaacatatgcaagaagtcatttgacaactttattattaaagatccctttctagagatataatcagtgtgaaaggagaagagacagggatgtctctcttcttcagtactgacttgtgggaagtaaatatcctggtatggtatgggaatgtgtggccaaaatataatttaatcagagtaacgaattgcccatcaggcctaatgtgtctaattttgactgaggcagggaagacccaagaaagagttgctctctgtctttgaacaccccttgcctgagagagagttcacttgagatctagaaaatatgtagggatttggggtaagacaagtgggcagtaaccaatgtataccccagcaaggccattttaatggactcacagttccacgtagctggggaggcctcacaatcatggcggaagatgaaggaagagcaaagccatgtcttacatggtggcagtcaagacagcttgtgcagggtaactcccctttataaaactatcagatcttgtgagacttattcaccatcacgaaaacagcacaggaaagacctggccccatgattcaattacctcccactgggtccccccatgacatatgggaattctgggagctacaattcaagatgagatttgggtggggacacagccaaaccatatcagacatcatctgcatcaatagacaccagatattatggaacaagaaggggatgagcacacttttctctcctcagtccagtcacagccaaacccctgaatttagctcaagggcttgactccagtaggcacctggaccaaccaactggggctcagtcagaggaaagtgatgaggatggggcagaaaaccaaaaccctgtttgttatttagggccatgactataggagtaggaataatggcctgaagaaaagtggacccagtggaggacatgacagttattttcaaatctgaagggcttccacatagagcaaggatcaatctcctctggctcagtcccagtgggtggaattggaaccaatggtaaaaacttccaggttgcaatatttggatttgggttgggatttggatctgtatatgtcaaagacacagtgacccatctcagtggctggtcccactgctgggggtatttaagcacatatggaactaccacttgctgggatgttgtacagggatcccagcatgcattcacctgttggcttcttcactcaatgaactaattgatttcttttagttaatggttaattaactaacagttaattaactgttaatagttaattaacaattagtggtgcctgccatgtgtcaggctcttacagcctggtctgactgactacaacctttgaaatctctactaactttgtgattctttgatactctgagtataattagttccattttgcatgggggaaactgatgtaccaagatccggagtgagttgtacaaagccacggaacacatatgtagcggactcttcattttctctgagcttttgctctctctagtctcctttctttttcaaacggctgtttctttcagagaaaaaaaaaacacgcaaaaaaaccatctgggcttggcgagcacgtttggggaggatgtgcagttacccagtattggtcggaaagatgtgttttcctgactctggacaaattgaagcaagctctccctttgatctgcaatcttccaaatttccccagatacccccaagcagaggcagattatatgcaagggctgtggttcagatttgatggaacacatggctttctcactggggcgtggctgtggattcttcagattcagtcgcccccgctattctctgcacttacattccaaaaattgctgtagaaaccacacacctccaagaaagccaatttctttttaaacatttgtgaatctttctctctctctctcacacacacacagacacacacacactaccccactccatagccaatctttacatcttatatctgtggcttttctcttttaggacctcttgcctggcagaacctccatgggttgggagcacctcatcaggcaatgaaagccaaccttacttttgcagctgggcatctcataaggaaggagcagggccattcagctcaagcctctattcctccgtggtgcatcaggcttgcaagatgtagcaagagcaaattagcagctgtgtaagactgtctgacgctggtaaaagcatctgttgggaaacttgctttgtaatttcctgagcatttagggtcagaagtgggtagaaacccccaaatggaagaaaagcctaattgctttcaagtgggagaaaaataagaaacagacaagctcgcatgggtgcagtgtgtggattctgaactgcaggcctctggggtaaatgtttccaaagcaatactttcttagggagcaagaactcactttctcatgaaatgatttatttggcacagactggaccatatgtgggtgggagtggtgatcaaattcaccctcccaacattgctctgtaaggctggagatgagttggagaatgatggatcggagcccattagtgagttctctgtgttagtgtattggatcatctttcttggttttagtcaccaacgagttttcagcacccggaacagtgcctgacacatagtgggtgctcaacaaacatttgttgaatgacagaatgaatgcacttttgtgtcctaagctctctctaaagtttctatgtcttagttggctctgtatttggttgatatctgaaatggaggttaaaaacaacaacaacaacaatagaaaaaaggaattttgatctctagacagaacttgagagaaatataaactggggaggctgaaagaaaataagggagccaacatcgctgcgtagggatgtttggcgaggccacggctcatatgcagaccattggaaagtgtctcagcctggtataggcctgtcgtttctctcacatacctttgaagtttgcatctcactctgaactctgcagtgaagattttgcccttgctttgcttcaaggccaaggcctttatcctgagatcaagggtcttccctctctctcctatcactttcgctacatctcttttcttctctttccctacactgcaattctccttaatagctagtttcagttctggatggtaagattgggcttcgcgaaagacccatttcgaaactctctcttaacaaattcacatcttgacagctttcattggcctgaatgtgattaaagctgagacttcagggaatcgaaactgtgatttccaaaaagcacacagcatctgcataactaaaaaccctctctgactgtatgtgactggagctctagaggaaatttggagaatttatgtaccccccctttgccagctgcagtttgtcactctctttagtacttggagtaatagctctatgttaatagtcacaaagggttgcatattttacttactaaatgaggcttaaagataaaacaccttctttctttccctcctccatcaataaggcacacttagcagaaacatcatgtagagctatttgcaaaaggcttgatttctttagctggagaaagaaatggaaacacaaagacgacttgcctatgtgccttcccaagctctcttggcatagagagcacaggctcctctgtgtgttgaatccaaggttagtaagtcagagctctgagagccatggcaaggataggtgattccttaggtaataggttaggcaggggaggagggacaaagagaggcggaaaaaagagaaaaaaatttacaagacgagaaaagaggagaggtggtaacatgcttccagacagctcagctgcctttctgtgcatcagctcatgactgtggcctgctgctctagacaccaaatccccagctgattcattcctcttgaagagatgcctcattggctagtgactgctccctgccttaatgggatgtgcctggggctcagatatgtggtttgctaagcttggagactgaacccaaccgggaggagcccaactccacagatacaaaggcaataaatgcgacaaagagtggggggcccttggccagaatcaagctagtccctggaggtggtgctctctacatttccttcaaatgatcagattctctcattgagaagatggggctgagtctccaggacccaggatgccatatgcagctactgagctagtggcatgcacaggctttggttttattggaagtcgtcctctttggcccaacaccagataatacctaaatatgagaattagagttttcaagccagattccagtcgtgggtagtagtagctatgcagacttgctgtttacaacttttttttttttttttttttttttgagacggagttttgctcctgttgcccaggctggagtgcaatggcacaatcttggctcactgcaacctccacctcctgggttcaagcaattttcctgcctcagcctcccgagtagctgggattgcaggcacctgccaccatacatggctaattttgtatttttagtagagacggggtttctccatgttggttaggctggtctcgagctcctgacctcaggtgatctgcctgccttggcctcccaaagtgctgggattacaggcgtgagccaccgtgcctggctttttttttttttctttgtcttgtcctaggacattagctctggccttgtcccaaaaggccctagctccaggactccatttcataaactgaaatgcaccagggctgggtctgcagccccgggctggccttaccctttgcatctttacacagttctgctttgctgagagaagggctttgttcggcagccttatcttctgcctcctttgtcttgtcctcagtgctccaggcaccctcccacttctgcaacgcctgactgggaggcaagtgcccgtcttcaggtaggccctcttgcctcttgttcccatccttcctctcacggagaaatctggacagagaaacatccaccctcaggtgtgatgtgctgagtgactcaacaaacctcagtgggtgacccatcatgtggtcacaagaggaagatgttgaactggaacccccaacttcatgaaaaatgacttaatctagaaaggaaagaaatgagccgggcgcggctgctcacacctgtaatcccggcactttgggaggttgaggcaagagtttgagaccagcctgggcaatataacgagacctggtctctacaaaaaagctgaaacattagctgggtgtggtggtgcatgcctgtggtcccagctactccagaagctgcggcaggaggaccacttgagcccaggaggttgaggctgcagtgagctatggtggcgtcactgcactatagcctgggtgacactgtactccacattgagtgaccctgtctcaaaaaaaaaaaaaaaagaaagaaagaatactgtcagcttattcttgcaaaagatagtaattcccacttaatagtctcattaagtgggaatactcttctaaatagtaagacgattggagaacaggttttccacactaatgcttccagtggtgacaacaaagtatttcattttagagtaagtagggtcaacatactgcatgttagactgtgttttctgtttttcagttcacattatgttaattattcatttatatatttttagtaatgaccagttgtgctatatgtaatggtcagttttcatgcctatctccactgttagattatatgttccatgaggtcagaattctgcaaaccttgttcaccaatgtacccctaccatgtagtactatatctggcaaaaggtagatgctcaatttgtatttgttggatggatggatggagggatagatggatggattacaaagtattggatgaaggtagagaggaaacatagatagtagactgtagactctaaatattaactatgaagaagagagagttaatagtggtgcttttttttttttttttttttttttgaaacagagtcttgctcagtcacccaggctggaggtcactgacctgttctcagcccactgtaacttccgcctcccaggttcaagccatttgcgtgcctcagcctcctgagtagctgggattacaggcttgtgccaccacgcctggctaatttttgtatatttagtagagacagggtttcaccatgttggccaggctggtctcgaactgctgacttcaagtcatccacctgcctccaagtcatccgcctgcctcagcctcccaaagtgtcaggattacaggcttgagccacagcacccggccgatagtggtgcatttttaatcaacctcaagtccacagtgatgaccagagtgagtcaggagcagaaagtcaagggcgtgcttcttcacccaagaaggttgtgtttgggattgttcaagagtgtcctgctgcatagtaagggctcagacaacaggccatgacgttgctttggcattttctgggtagcccacctacagaagcactaagtggcaacatatttggtaggtttaatatatttttttccctgagagccaaagaaatttaatctgaaaacaaggatcctggaggtgataattagaagagaatggttaataatagagtcccaactggagccttatactcacatcagacatgggaactatcctcatccatattggatagaaacctgaaattttctcatgccatccagattaaaaaaagatgcatcatttttcatttgagttgcaacttggtgcctacagttgtgttttttgaagcttctattcatttctgatggttcttttactcctctcaaaagactcagcttaagcggtttatgtgttgcacagttgtgactagctgggcagttttttttttaggaaaacaaaattgttaggcttggaaaaacatctgctctgcgtctgttcgttagattccgccaacttttttagcaagttgtgacatttgaactgacaaccctaaggcatatttcggaacattaaggaaatctatgctcaataaataggttattatacatctctccagtgtcccactgaagaatctgaaagtgcttctttcgctttgggattcttgtttataaacttgtagctcagcattcccatctatcgtatcaagaagatatgcaaatgatgtgagcccacaggactcagttaagccatgccttgtcaagatgaatagttatccagtgactgctggtgagctgagatgccctccctgggaacaaattctggcacttaaaaatcatactcataaaatgttgaagagaagagaatgctttttaaaggcccccatgtcaaagaacctgtgggggaactgaccagatttccatctgtttcaaattaaacgtgtttattatctttgcgtcatgctccccagctcagcataatcagttagaaaaagatcttctgtgatcttagcggaaagcatgtttttataagtttatctggctgcttgcttccttacacaagccagcgatatttcttccttcattttgactctgagttgtgctttactggaggtaaagcatgatgttggtgggctctattcatttggcacttattttctgtttcctgtcatgcccctgaatctatgctacattttggggatacagtgggaacaagatactcagtaagtaaatatataagtaaagtaattatagtttgcaaaagttgccctaaaggaaataaacatgggagacagagacaatcaagccaagattgtcaaggacaatctttagattgggtggttagaaaagaatttagagctgaggcatgaaggctaagaacaagcctctcaaatagaaatggaaggatgaggattccaggcagaagaaacagcatctgcaaaggctttgagatagtcaaagcctatcaaagcctctggtcatcactgtggacttgaggttgactaaaaatgcaccgcatagcttcctaatatgatagatgggaatgctgagctacaagggcttgcagtatctgagggacagaaaaccagccaatgtagttggagtggacagagagggggaaaatggcatggagggatgccaggtgataaggctggagagaaacctgagcctgcccaggcaggttttatgagaaatattcatgattttagattttattccaaaagcaatggaaagccaagggaaaatgccatgtttggatttacattttaggagaattaggctggcttatctatgaagaacagattggaagggggaagggggaagcagggaagccaggtgggaggcggttggctcagtccaggtgagagaggaccacagcagcttgcactgggatagtatcattggagactgggagaggaggatgagcttgagagaggttttggaggtagaattgacaagacttgtgggtgcattggatagaggagatagacaataggaagactcaagggagctgctagcgtgttgacctgcaatgaggtcgctgacagtactagtgactgtgagaagagtcctagggaaggaacgactgttttgtgggaaggtggggaatggaaattcatcttgaacccattaattgggaagacctgttagtaagctgtatgtagaaatgaagaagtcttttggcaatgtatctcttgaaagggcaaaccttgtaactcattgctgtaactctcaacgtaatgatggaaacgtttggaaaaacatgagatggcacttgagacaactgaagtccggaaaatcagagatgattcagggttagcaataaatctagcaaatgacatagcatatgggaaagtgtaaacatgggttttctcctttgtagcttcctgtctgattagaccttatttctgtattggaaacaaatgtgctgactgagatgtgggtgcagggagtgtgagggctgcttgtgctgagaggggatggccaaaacgtccatcaaggaagataagctttatgattcagggagaggaggaagtactccagggttggaaggtacgcttaggaaatgatacaatgtacttatttaatattgtcctttgagttttatggagtgcagcccattttttttaaagctactctttaaaatgatattttctctgtaaatcaggcatgaaaaaaaaatgacctgaggcccttcttaacatttcttcagtggagtctctgccttcctattaattttcagcagattgggcttgtttttctacctgcctgcccatttccaagtacaagctgtcccactctttgcttatctctttctgtttggtgttcaaaaggggtccatggtgcttttcgaaaccataatatttggttggttagtgaacagtctgcaaagcaaaatacattactttgatgttagcattggtaccagacctggaagaggagattgaccctgcaggtttctgctttgtgtgtgtagaatctcagaatggtgcaggggagactcctctactgttggtatagaaaaggcttaagttttggagtcagagagccctgagttcagtccttagttctgctgttttctattttgcaactttaggcttgtgacttaatgtctttgaacccagtgttttcgtcggtaaagtatggataattatacatatgtaaatggctgggttgttgtgaagagtaaataatatgacatatgtaaagttcttagatgatacttatttcatgctggttaccacaaatagtctgtcatgctattatcattgaatatacaaatataatggtgtcagtttgacaggaaatataccttcttggtttgtagccctgtaagggctgttgacaagcactaaaaccatggtaagagggcaccggagtgatggggtagggcttctctgatacagtctagcaaatgttgcaaaagggaagctcctggtgtgtttaactcacttatttttcaaattgtgttaaaaattcaaattgaccagttaagttaaaaaaatggagacctttcctatgcaatgtggatgacaagcttcttttgaaaaaccagatctggcaacacaagaccccctgcattccagatcatgaccatcagctgtaacttagaagggcaggctctttccagttctctccactgtttcttcctagtgctctatcttagagataacctagtgttacctcttatattgactactgaccagctcatgtgattggacaaacactttcactcttttagtctcagttatcccgtctgtaaaatgaagatgataatcattaacgcttatcccaaaagtttcttttgaggattaaaaaacctcaattaaaaagtttttttcacagtgcttggtggagagaaagaactcagggttagctattattatggtcattattaggcagctttgcaaattaatgggtatctaattgaaatacatacctaagtggacaccgacagaaattaaactgtggataacacacacatttgttatagggacataatatttttgaaaaatacagtgaatttttcttttttcctactttcttgtagttggtcttctctatattctcctcttagggaaaagcatttgacagagaatcttctgctgtcacatccacccttcaccctattccacgctgacttgtttggattatatcagtagaggataatggtgtcactatttattcccctgtctagcttcttccctaaggcattgcattgagcctgctgagaccctcactgaagattactacttcccttcaaatattctctccttctgagtttggtaacccttccgtcagaccatgaggtcctggacctggggtggtaatgatgacactctcactagccctgaggctctgtcacgtttcttgcagtgctctcatatgtctttgaaccttttgtagacaatcttttttatcaaaacaatttctacttatcctacttggagtaaatcatcagctgatgtagcttccattgccttgaaaaaaaaattagaattgtggctgggcatggtggctcatgcctgtaatcccagcactttgagaggccgaggtgggtggatcacttgaggtcaggagttcaagaccagtctggccaacatgctgaagcaccgtctctactaaaaatactaaattagcagtacatggtgacaggtaatcccagctactcgggaagctgaggcaggagaatcgcttgaacctgggaggtggaagttgtagtgagccaagattgcaccactgcactctggcctgggtgacagaatgaaattctgtcttaaaaaaaaaaaaaaaaaaaaaaagaataaagtaaaaatcaaagaaaaggagttaattttaaggttccaatctcaagacaatattttgaatctacagcaaggtaatggtcctagaaatcaggcttcatggagagagaaaaaagtttttaaaattcttggaggtttccattaacatatagaaagccaggctaggtcacagaggatcaaagccacaagtggagagcaggcaggagaaatgacttgtgggaaatttccaccagacaggaagagaaaatagaaaccattgccctggagaaggaagggagattttgagagggcacaaccaggatgtgtaccgcagcttggtcactgagaaatgactgtttcctccccaaccccaccttacttaagcaaaattggggcagggtgtgatgaggcattggaaaccctcacagaaagcccagatagcttgagggagagtcaacacatcttgacttgtcccccgtgtcccccctgtgactactgtggtagggaagtggtgaaacttccaccatccctcttccagggtagagggttccttatggcccagagttcctgtctgccccagggagaggacaccaaggtgctgagaacaatgttgtcttggtatagacttcagggctaagaagcaagaggccacaaaccatagagggctggtgatttgagggacccagagaccttggacatcagcagcagatgccagcggatgcccataaaggacagtgaaattggccacacctaagtaaacaccagccaaggacattcagggacaaaaccagcgtgtagctgaagactcaggactccaaggactatatgccagcttttctctgcccccagatatcaccttgggaagaagatatgggcaaagtgaccccttaagagaggagggaagcagtctttgaatttcctgggcaatttacccaaatgaagctgagttaatcccaaagtgaaatgttttaaacaggaacaaagtcagttgcccttaattaaaattaatttaattaatttgaatttttctctgccagcaggaggaaaggtagcttcagagtaagtgagtaattataaacaataatgaacttcatcttttttatacttctgagtgttctgtataaattttgttttgtaaattctgcatgacctctctcacaagattgaccctttgctctggaactttgtctttgagtcactgagtcatattaagggtggtgaatgaattttatctaacataaccattacttttacttactaagtaattttaaacataaacatggaaggaaattaagatagaaagaaaaatatcatatccctccaccctaaagcaaaaacatccattttgaaaaaatattttctttgcccatgtggttaatatactggtgagagattggccaaaccgtttgcctacaaaagtctgtcctgtcaacatcctgagtttgtccttggtgacgtaaaggaaaagagagagaaagagagagagaaatgagctgagtacctgatgttgtcatatggcatcaagcttctccttacttggatgcccttccaattagtgaaacaggacatttttaggatggtgtccagactcaacagtgtcaataggatttcactctttctatcttacttcttagtgtttgccattatacaaaaccccaggattcacggggattcctctctattcttcatctggcattctagaccctgattctggggctcttgactgttggattattgacattatgatgttatgggtaggatattccaagtagaatccctgagtttttattaattggagtcttaaagaacagatttacagatttaaactttgcttacctctgcctgtttttctcctttgtgttttaatgcatgtgacactttaaggaagtgttttacttggatacttgggaaatgagcagtgaagtgaaatagctttccctgctcttatttgtattgctctgatttggaggcatatactcttctaaatgattgcttattcacgtgcttctgtcaaattagaaccttaaagaggcatgatcagatttgcccacattcctgagtaggggagatgcctatttcaacaatagtacctacagggttaatacagaccaagaagcctacttgttgtgggtaagttacagtagctggtattttaagatgacatttgtttgtctctgcaaatattcccacaagtgttctctcagtagttcactgtttggagcttcttgcagaagtatctcaaacatgatgatcatggggccacatgagaagtactaagcaccgttgatgatgttcctgtgtatttttcagctttgaagggggtgacacttagataaaccctggagaaaaaaaaatagagaaaagactgaatcaaacctagaggcaaaagctatggacaaatgggtgaaataaacaagcaattttctttttgttgttcctgaagcccactacattagctttggcagcattaccagattttaagtcatgctgaccaaatcaaatacgaaaatcagatcgtgataagctggactgacattatttctaatttcttttataatttcctttgtgagtcatgaataatttagaaccatatttctttcagtttctgaacacacaaaagtatttttgtttttttctttgaaattgagttctcattgcattgtgttggagaatatagtctgcatgttttatcaatcaattccttaatatttattgaaatgtcctttatggtctggtatgtgctcagtttttgaaaatattctctggaaaattgaaaagaattcagattatttaagagttgacataaagttctaaatatgtgaatttgaccaaatgtcttactcctgctgtttaactcaccaacatcattaattttttgatcacttgatcgatcagtctgtaataattaagtattaaaaattacactctaagaaattcaatataccataattttattgacctttactttatatgagttgttgcttttgtagggcaaaaagtggtcaactattaggaatttcttacagtttgatgtaatattttggagctatgttgctcatgtttgttggttcaggtttgtaatatttttctgacatattgtgtgataatgtttttactttaaagtctatttcatctgccaatttatatggttagagcatctttattttgatcagtatttaaaaaatgtaatccacatatctttcttctgattaaattctatttggactaatgtctggcatattattattattttttctatttactatgagtttgactcacaataaatattcagtacttggtagtttaaaaataacaaatattattaatttaataattgatgtatttattattaatattctctttataagagtttaactttgatgctgatgtagtttcattatgattttttaaaaattatgataaaatatttcctgtatttattagccatttcataagcttacctgatttttttatttgaggttttattgtattttacagtagcagggtgggtgaaaagaggatacatagaatttttatgtatcagtgttagctgtggggttagctttggcttattgaagttaccaataatgaacaatcctcagtatccaaaggatacagaatcataaaacgttggagatggaaaaaaacatctattgaggccgggtatggtggctcacacctgtaatcccagcactttgaggggctgaggtgggcggatcatgaggtcagctgatcgagaccatcctggctaacacggtgaaaccccgtctctactaaaaatacaaaaaaaattagccgggcttagtggtgggcacctgtagtcccagctacttgggaggctgaggcaggagaatggcatgaacccgggaggcggagcttgcagtgagccgagatggcaccactgcactccagcctgggtgacagagcgagactccatctaaaaaaaaaaaaaaaaaactactgaaacttcccatcaagaatctcaatcttttacagaagaccaaaataaagacatgctactctgatacagggcacagaggttccaaacagtgaaataataactaagccaggtctggttcacatcattttacttccatttttgtctgcaagagactgtgaaaacaggagatttcaaccaaaaaatctaagcctattgcactgggaagtggtgattccctctgagtcagattggatgatatttgaggttatttaaaacactgagttttgatgttttttttcttaaatacagaagaggaggatctcacagttaatgatagaaccagacctggactattgatttcttgattccaaattcaccattctagatataaaggccacccaagtctcctcccaccccccagtgtacccctgtgccttgaggccatagttactgtgaactatgtattgtcatacttctttctctcctcagagacactccatcagtggagggaccctgaatgggagcttatcaggactgcagccttctttagggaggaaagggtaggatgatgctagagaaacaagaatttttccactgaacactaagctaaaaagggagaaaagaaggccttttgagaaaagccttaaggagctgcaattgctcaaccagtggaacagctgaggattggtctatgtgagttcagcattcgcttggcaaagcgatgcaccctgcccaggggctggtactacaaagttggcaaccatatgtttttcatatctcagtatgaaaatggattccaatttaaacataaagtattaaagttagatacaatacaacctcacttaattcactaattcagaagttgtaattatttagaaggagaaaacctgatatttaccttcatgttttttattttaggaaagaaagagagagcaacagtgtgtgtctgagagatttattgtataatatgatcaatatattcactaaatattatcactattcattaaaataggttttcaaaatattaatacttgaagaaactattagctctaattgaaactacttcacatatatatggaaaagaatcaaaaagcagatttctggaaagtgtcataattcatatgcttcagtaagatacttagatgatctcattcattcatttagtcattcaacaaaagtatattcagtgccaattccgtaccaggcattatgccatctagttctaagcagggaagtttcattttgtaatggaacaagtgaaaagaaccgcttttcttgaatttcttctttaaaagtcacttatgtttctactgatttaggagagtttaaatgcaaacatatgagtaaagaaacaggctagctgacatatccagtcacaaaagacaaattgtgccttcctgttaaagtctaatatttttcagctaaaaagtattcatccatgatgttcttaataaactattcataaatatagaaggaagacatgaagccacagatatgtttatttgacatagagaaggcttagttcaggggtgggaagaccacttttgtaatgcatttttttttttttttttgagatagagtcttgctccgtcacccaggctggagtgcagtggcgtgatctcagctcactgcaagctccgcctcctgggttcacgcctttctcctgcctcagcctcccgagtagctgggactacaggcacccgccaccacgcccagctaattttttgcattttttagtagatggggtttcaccgtgttagtcaggatggtctcgatctcttgacctcatgatccgcctgccccggcctcccaaaatgctgggattacaggcatgagccaccgtgcccagccttgtaatgcatttttaaaattgattttacacaaatgattctttctataagaatataacatatagcctccaacctgacccccaggttgaaataaaataatggaggctttgcttagtttttccaaagagatgaatgtaatgtaatcaataaaactggaacatcttcagtttgatggggaaactgagcaccaaagaagtaggcaattttgggaaagaaaaaaagcatccaggagtctttggtgaatatcctaatgctgaaaaagtttggggagatttggatgtagggcacctgactactgagcaatcagtagggtgtttcttctgattgatcctatctagaagcaggaaaaagtaacttacattcaatgggcatctgctttgggatagctgtggtattagattatacatacacatacacacatgcttacatatgtgtatgtatagattttatgcatatgtacatattagattacacacattatatgtgcacgtgttttatatgtatttataatatattttatatattataataatttaaaatataatctttccaaatacctgtgatataagtagtattagccaattttaatgataaagtgtcttcggcttagagaattacttgtgtaaggtcatacttttaagaggaagaatgaggatttgtgctgaagtccattgagttccagaactcactaatttttccactatatattgttgtccagagaataaatgagctgaaaactttaaaaatcagattgatattttaatagactccatcatttgttaggtgtgtgaacttgagaaaattccttaagctctctgagctgcatttgactatttgcaaaatggggttatagaaagttcactgcctgccttagaagattgctggagaattcaatgaaacagtaaaataaaagtacttagtgaacattccaaagtaatgtagaaaataatactatgaaagaactgtacaaggctgggcacagtggctcacgcctttaatcccagcactttgggaggctgaggtgggtggatcacaaggtcaggagttcaagaccagcctggctaatatgatgaaaccctgtctctaaagatacaaaatgtatatatatatatgtattagccaggagtggtggcatgcatctttaattccagctacttgggaggctgaggcaggagaattgcttgaacccaggaggtggaggttgcattgagccgagatcgcgccattgcactctagcctgggtgacaggacaagaatctatctcaagaaaaaaaaaaaaagaaagaaagaaagtactgcacaaatataagaactcaccatgattacttttatgattgtgtgaggagacaaaaggtaaattatggtaagtactgtaatttagccaatgatatgagcaagatcaaaaagaataacaaagatattttttattgcaatgagaggaaaatgcaatgcacaaggaattctcattgcttttgtgtgtttgaaaatgtccatgacaacatggtttaaaaaatactttcttattttaaaaactaattccctgaaaaagttttaaaaaatacttccttgtttggctattaaagattagctaggatgatggttaaaaataaggattcagtagccagaatacctgggtttgaatttcgcctctgccacactctgtgtgaccttgtgacctattttatcttcttgtgtcttgctggcttcgtctataacatgtggataaaaatggtacctacaccataggcttggtaggagaattaaatgagttgacgtttgctaagcacttaataaattacatacaagtatttgataaaatacaaattttgtacagaagcaacagattgaccaaatatattgtgggtttcaaatagctcccatttacaaggaacataaggatcagaaaggttaaatgacttaatgtcacacttagtaaatagctgtggctgcatttgattctgggtctgtcagattccaaaatcttggttctaggtgctgtgctgtctcctgtggggaaactatgataagtcagcccggtcttattttggcaaatgatactgtatttaccctgacatttaatgatgtcttggagggtttcttggatgggtctgtttgtgggaaggctgagatgcaagtcctttttagaagacaagacttgtttatctttcatcaggagacactacctggggacccctagatggtgccatcaggactttaaaggatgccagagtttgacaggaggtgaagttgggacctgagaagtactttctgttattgggcttccactttaccgaatgggatcaaggagatgaaaattagagtaagaaacacaagacaggcctagttgtgctgcattgtcccacctcataaatgaagatctgttggctgggagtggtggctcatgcctataattccagcactttaagaggctgagggtgggaggatcacttgagcccaggagttcaaggccagcctgggcaacatagggagaccccatgcctattaaaaaaaatcagcagggcaaattggcacacacgtttgatcccagtgtcttgggaggctgaggtgggaggattgcttgagcccaggaggtcgaggctgcagtgagccgtgtttgcgccactgtgctccagactgggtgacagagcaagaccctgtctaaaaaagcaaacaaaaagcaactgctgtcactcaatattaaaagctaccaagttcgtgaagcatcctatgtgccaggcacacatatattaatgcattcagatattaacttgattcttttagatgatccatagaagctctagaagcttgaattgtcctgcagatttattgccattatttgcactatctcttgctaacagaattatcactgaatgtgttttattagctctagagtgaaataaaaaatagaactagacagattatgtaggctgcctccatcatatggaaggataagaccatttcagctttactcttatttcttctgggataatgttcttactctttttgaatcaggctgatctgagcccatcctacacaaatgaaaaactgccagcctcacaggatgtcagaaggaaaaatgaacatagaaatgggttaaaacttacttttattccttaaagaagaattaagaaaaggttagttgctttgacacagagaaaatactcataaataaaaacatgggtagccgatagattatccaataatctttcagcccagttcagtttcaatgaattatacttctgagaatcaaagctaaatagtcaaatgccacactattacattttgatgaaaagagtgggatcttgcttatccttaaatgtggattttaatgacactcttgaatctggtggccaatgccctgtgatcacagtgagggtaaaaatagtaacagcaacactgtcattaacattggtatatcttattctttacaaaagagattcatacgcattttcttatttgatctcctcaatcctgcatgggacactttagttctccattcttgaagtgggagaaattaacgtccagagattataagacttacctactatcattactaataacataagtcattagtaagtccaggacatttagaatattttcctctatcccattgttttggaccaaaaagtaatgaatctgtggtagtgaagactgatcttcataaaaacactttgcatgatactggaaataagaggtcataaataaataaaaattagcttgtgaagttttttaaaaacagcagtcctagatcctccaggatctagtacaagcagaaaagtacatgcagtactcttctactaacctaattgcttttctgcagcagacaggcaactgaatatttgcaaaactgctcagtggaatggtttaattctttaagaactgattttccagtttttttagaggccgcacaaatattgctaagttgtatcacttgagaattcttgggatagtcaaatataggagagcaagtctgctcatttccccagctcattaaaatgatattgcaggaagatgttaataagaacctttcatataaaaggatatttcctgagatttatatacaaatagtgaatatacagttgactcttgaataatgtgagggttgaggtgctaactcttgcacagtagaaaattctgtgtataacttttgactctccaaaaacttaaccagtagtctactgttgaccagaagccttactgataatagaaacaatcaacacaaattgtgtatgttatatgtattatgtactgtgtttttacaataaagtaagctagagaaaaaatgttaccaataaatcctaaggaagagaaaatatatttactattcattaagtggaagtggatcagcataaaggtcttcatccttgtcattttcatgttgagtagacagaggagggggagaaggagaaggaagagaaggggttggtgttgctgtctcgagggtggtagaggcagaaggaaatttgcatataagtggccccaaactgttcaaaattgtgttgttaaagggtcaacttgatcacagggaagccagtctatcagcagaaagattctttttcacctaatcatcaactaatataacttgaaaggaagtcagcttggatctccaaccttcttttgtcatttggcatctctctctgagagggacacgtagtgtcttttggaagcagcagaggccaatggggtctccacattccatacaatgatgtctccatcaaaactagtggtagcaaagggatcaagaggtggacagtcatccacagctaagccgcattctgtgtggagctgtcctcccattctcatgtgttggtgaccacgtgaatgctctagaaagaaccatacaggaaaagactcatctgggttcccagtgaggatgggtcacccttccctagtggactgagtggctctgactgctccacactccaaacaaagccttatgaagttcagagcaggactttgctaatcccagccctttgcactggtggagaatgggcagtgtgaggcccctggaagactgctttctgggatttctctgctttcaggttgctaatgactagctgagccagacacacaacaaccaggctcttctctctccagtgatcttgtggttcatttctcccaccttacccattcattcttccccctcaacatactcttggaatgactgtatttttctcgttgtgtttatgctgattacatatttgttggtcttgtctcccatacgccctctttacagggtggggacaggcttgttccccaccatccattatctagagtgcctacttacagagcttcatttcccgagggagtgcagtaaaggcttgtttatcaactgctggattcctcagaatgctctctcttctactatgggagcttttctgattaaaccctcattcaggtctggtaaagtcagttcgggtcaataccattcacaattcataagttcctcctatgactgaagcacagggctaagacctttaagcaaagaagatacagtctgtgccttccaaagcctttgaagcaagaggaggcattatcagttcagcagctttcagccttgctgttaacacattctggtgggctctatcagttgtgagacatgtcatcagcagtttgttacaaataatagttaaagtgctgaataaaatgcactaataaaaataaatctagctaggtgcggtggctcatgcctgtaatcccagcacttagggaggctgaggtgggaggatcacttgagctcaggagttggagaacagcctgggcaacatggtgaaatcccgtctctacacaaaattcaaaaattagctaggcatggtggtgtgcatctgtagtctgagctacttgggaggctgagttgggaggatcacttgagcccaggagatcgaggctgcatgaaatgagatggcactactgcgctccagcctgggcaacaaagagagaccctgtctcaaaaaaataaaaacaaaacaaaataaaaaaaaattgaaaagtaaatctaagtggattcagggttattttgactataacccttcataatttttctagcattatttatgtgtgtgaaactcacataaatatgtagtttccaacttaaattttttttcctgatgcacatgtcccccatacccctgtgaatctatataaggagtgcttgcttcatttcagctgagacataaggtgtggtgatgtatgtgtgccaaccagcttaccagctctggctttgtgcctctcatctgtgttaggaagcttatctgaatgcaagtcatcagtggtgaaattattacaaatgtcatcttttagggggagaggaggataaattctgatgaggaaagaaatagaaggctaagtttcctgggtggggcaaatctcagctgggccttgaaaagtaggtggaatgttgtcagagctctggagtataggggtcagcagtaataagaaggtttgggccatgcagaaaaggacttcgataaaattcaacatccattcatgttaaaacaaacaaacaaacaaaacccctcaataaactaggcactgaagaaacatacttcaaagtaataagagccatctctgacaaacccacagccaacatcgtaccgaatgggcaaaagctggaagcattccccttgaaaaccagcacaagacaaggatgccctgtctcaccactcctattcaacatagtattggaagtcctggccagagcaattaggcaagagaaggaaacaaacggcatccaaataggaagagaggaagtagaactatccctgtttgtagatgacatgattctatatctagaaaaccctggctgggtgtggtagctcatgcctgtaatcccagcactttgggaggctgaggtgggcagatcacctgaggtcgggagttcgagaccagcctgaccaacatggagaaaccctgtctctactaaaaatacaaaattagccaggcgtggggcgcatgcctgtaatcccagctacttgggaggctgaggcaggagaatcgcttgaacccaggaggcagaggttgcagtgagccgagatcaggccactgcactctaagaaaaccccataaccccatagtctctgtccaaaagctccttgatctgataaactacttcagcaaaagttcaggatacaaaattgacaaacaaaaatcaattgcgttcttatacactagcaacatcccagctgagagccaaatcaggagcacaatcccatttacaattgcctatgaaaagagtaaaatatctcagaatacagctaaccagggaggtgaaagagctctataatgagaattacaaaacactgctcaaaaaaatcagagatggcacaagtaaatggaaaacatttcatgcttatggacaggaggaatcagtgttgttaaaaaggtcatacttcccaaagccgtttacagatttaattctatttctaacaaactgccaatgacattctttatagaactagaaaaaagctattttaaaattcacatgaaactgcaaaagagctcaaatagaaatggcaattctaagcaaaaagaacaaagctggaggcatcatgttactcaacttcaaactatgctacagggctaccgtaaccaaaacagcatggtactggtacagaaacaaacagaccaatggaacagaatagagagcccaggaataaggccacacacctactatcatctgatctttgacacagctgacaaaaacaagcaatggccccattcaataaatggtgctgggataactggctagccatatgcagaagattgaaactggacccctaccttacatcacatacaaaaatcaactcaagatgtattaaagacttaaatgtaaaacgtgaaactataaaaaccctggatgataacctaggaaataccattttggacataagacttggcaaagatttcatgacgaagacaccaaaaaaaattgctacaaaaagtagacaaataggatctaactaaactaaagagcttctgcacagcaaaggaaactatcagcagggtaaacagacaacctaaagaatgtgagaaaatatttgcaaactatgcatccaacaaagatctaatatccggtatctataaagaacttaaacaaatttacaagcaaaaaacaaacaacccctttaaaaagtgggcaaaggacatgaaccagacacttttcaaaagaagatgtacatgtggccaataagcataaggaaaaatgctcaacatcactaatacttagagaaatgcagaggaaaacctgaatgagataccatccaacactagtcagaatggctattattaaaaagtcaaaaaatgacagatgctggcaaggttgcagagaaaagggaatgcttatatactgctggtgggaatgtaaattcagccattgtgaaaagcaatgtggtgattcctcaaagaacttaaaacagaattaacatttgacccatcaatcttattactgggtatatactcaaaagaatataaatcgttctgccataaagaaacgtgtaaaatgcatatgtatattcattgtagcgctattcacaatagcaaagatagaataataaatgccatcaatatagactggataaagaaaatgtggtacatatataccatggaattctacgcagccatgaaaaatgctaaagagctaaattaaactaaagagcttagtttagctaagggtgaacctaagctctgtaaaattgtgtattcaagaaatgatctttcttttccggttctgtaatttatatatatgacgaggtgacttgagagctcctagctaaattggtgttccagtaccaaagcaactagcagccctgtgatagtggtaaataaaagggagctgggagtgggtgtctgtaagtgactgcctttcatgggatctttctcttaccttatgaacggcctaatgcctagttgcccaacctatgaccagttgaccctcacacgggaaacttgtttgtactggcagacatcttgatggctcttgtatgagccatttccagtttatacccacatcaccatctctctggcactgggagcctggccttgcgttcttcccaacgtcctagggaaaactcagcctgggttcctcagatggaaggcacaaattcaatccaccactgcagcaggaaataagttcaaagatttattacttacagatcctaggtagggagggcacacttttcaaaagaagatgtatgtgtggtcaacaagcataagaaacaatgctcaacatcactaatcattagagaaatgagtcagaagggcagtcctccatctccaggtcaggcaaggcagaaataaagagtcaggctgaggccaggcatggtggctcatgcctataatcccagcactttgggaggccaagccaggtggatcatgaggtcaggagatggagaccagtctggctaacacagtgaaacccctctctactaaaaataaagaaaattagccagatgtggtggcacatgcctgtagtcccagctacttgggaggctgaggcaggagaaccacttgaacccagatcgcaccactgcactccagcctgggtgaaagagtgagactccatctcaaaaaaaaaaaaaaggagcctgagagagagtgcaacaactagcagtgaatatagaagaataggatgtggatcacgtttaagttcctgggtaaatgtctgaatgatcagtttaaaggaagcagctgaaaagtgggagcccagtgtagtaggcaggaagaatgcctctaagttcttatctctggccactggtttgggccatttaggtatggtgttttttacttctgatatctgggcagtaatctctgctgtgccattcctgttacaggcaaacaactggatcagcctcactgaggtactgtaaggagatatagaactagaaactgtgttaagcgtgactgagccctgctttggtatgagaaagctaaacttatgttcaaaatgaatgccgaggcaacataaaattctaagaattcaccatactaggtgggtgttcttgggtcatttcctgatagtgtgggtaaaataggacacattttaacaaacaactcatatgtcttgagtgaccattgcagtcactgtgttatgttctccgagtgacatggagaaacaagtcatatgcacagtcctcaagtatgttccagtctaatgagaaaagcacgacatagaaggatgaaaaatcaatcaatagcaaagcaaactgtcgcagtttattagacatcacaatcttgtgctgaacaaagcttatggcaacacacttctctaagagtttggagaagaaagtgataacatgtgagttggagtgctttaagaaatctttgagaatgaggagagttttgatctggggatttaagttgggtagaaattagctgtctggagaagaggatgaagtgcttctgatgctcttctgggtgtttattgaatctaggagtgcttgttactctttgcattccttcaattatgcattggttgccatttaaggtattttctaaatttcctccatcttcattgtctattgtttcttgtagctttctttgtttttgagacagggtctcacattttcacccaggctggagtgcagtggcatgatctcagttcattgcaacctttgcctccaggttcaagtgattctcatgcctcagcctcccaagtagctgcgactacaggcctgcaccaacatgcctggctaatttttgtatttttagtagagatggagtttcatcatgttggccaggctggtcttgaacacctggccgcaagtgatctgcctgcctttgcctcccaaagtgctgggattacaggcatgagccactgtgacgggccttttgtgccttctttatctttagagtgccttcccagtaccccagatcaagctctgtaaaactgtatattcaagaagtgatctttcttttcctgttctgtaatttatatagaagaccattacatttatctcttagagacagattacagattaatatgcatttataaatctttgcatattttctagttttgagaaagtttttctctacccaaattaattttttctgttaattggtcagtgggtatattagtccattctcatgcttctgtgaaggaatacctgagactgggtaacttataaaggaaagaggtttaattgactcacagttcagcacgggtgaggaggccttaggaagcttagaatcatggcggaaggggaagcagacatgtccttatttacatgatggcaggaaggagaagtgctgagcaaaagggggaaaagccacttatacaaccatcaaatctcatgagaactcactcacaatcacgagaacagcagtatggagtaattgcttccatgattcaattacctgccactgggtccctcccatgacatgtggggattatgggaactacaattcgagatgagacttgggtggggatatagccaaaccatatcagtgggtcactgatggcctagagaaaatcttcattcactctgcatatgttaaaagaaaacacctgaagagatttgcaaaatgagctccactgccttgaccgaaagaggaggagcagcaagggaaaagcaaccaagtggggaggctgtttgttcagttttctcaaaagtaaagaccaggaagccaaatataagagaaatggaacacagaaatatttgaaacaggtgattatcaagaagaatttaaattcagtctttgctatttcctcttcatggttatttttatgtataatcatcattaattttcttgagaggagataaaaatgtggaggggagactgcatgtaatgtcagacaggtggccttgaggatgagtaaacatttggtaagtgcctaggccagtagaacaagaaggcaagggcacagtgaaggacagagggttatcaggagcaaagcagatggcagtttaaaagcacatgcagaatattctgggggcaagcattctgggagacaattctcactcagcaatcatgaaactgcctttgcaaaaattataacagtgaaatgggagggggggagatctgatctagctaacctccttcttgcctttagccttcaagctgccttaattattcctgggcttaggctgggtaactttgggacacatttagtttaaatgataatagccctttcccaaaactcaacttcctttgtaaagctaatgagagaccactaggctaggaggaggagaggagcctaaattctgctaaggtgtaaacataaacaatggccagccattattctagaagtcacaagatatgcaacttccccaattattcctgcagataacatcactatcagtagaacctaagattggcctttgagatatcttcaggtttttttgcatgtctgacacccatggctccacctagatctgccagctgctcctgtggccccacccagaagtgactcagtgcaagaagaaagcttcaactccctatgatttaatctccaactcaaccatcagcacccattgcctagcccctactccttccctcaaatgatctttgaaaaacccctaacatataaaccttcaatgagattgatttcagtaataactccgtctcttgtgtgatatggctggcttcatgtcaattaaatgctttcctcactgcaatgccatggtatgtgtttgtgcagtagtaaggaagaacccattgggcagttacagtgacagagactgtcagtgaccaaagggcccaagacagagaaaaaagtaaaggagctgggagaaagaggagttaatagttcaggaattagggaaatgagaaagaaggaattatatttactggatctccagtgtttgttggcagtggtaatgtcaagttggctgggccatggcactgagatatttggccaacattattttggatgtttctgtgagggggtttttgaatgagatttacacttaagtgagtagagtttgagtaaagcatattgccctccaaaatatgagttctccttatccagtcagttcaaggactgagtagaacaaggactaacctcccatgagcaagaggaagttctgccagcagactgctttccaacttcatctgcaacattggcttttcctggctcaccagcagactgtcttcagacttgaagttcaactttttcctgagtcagtcctcagtctgttggcctccccagtcagattttagattcaccaggtttatacagttgtgtgagccaatgacttaagataaatctttttctctctctccatatccacttgattctgtttctctggagagttcagacccatacagtgatgtcacaggcactctgtgcatatctcactgcattcttaagggcattgattgttgaaggtcaaatagttacaaatagtggtagagacaatattcaaatccacatcaagtcccatgttatcctcatcaaatcaccctccttggggcccagaaaaggacttttgaaaaactagtgagagagacagtagaaagaaactagcaaggcagatagggcagagtcctcggcagaactttccttctaacgaaaagcagcccaagaaatcacttctcttctaacaaagagcagcctggaagattgggctgcaaacatagataaggaagtgcactctggcacagagagggagcttcctgggtaatcagctagcttcacatacatacggtgggtcccagcaagcacagtggggcttagtaagcacattcctttccttttttaggcatactcagataaggaagttggaaacttgcatggggaatgcctgcagctgcactgatagaaaggattaccttgggccaggcatgctcattgtgggagcaccatcccctctcctttagcacatgcactgtaggaaagagataaacaagacagagtagttcaggctaaggacccgcctgcataataaaagattgggatggggactgccagagattcatgctctatgcagatgacacacctcgttttaactgttttttgtaccctatgtagataaggtaccccctccccactagctcatttataaaaacccttgcatttcactgcagaatggcaaccctttttgggaccccgctctgcagcagagagctgttctcttttttttgcccagtaaacttctgctctaacctcacccttggtgtgtctgcgtccttgatttccttggctgtcagacaaagaacttcgggtgccaccccaggcaatgaggccttttcactagaacttggatcatggatactcttgtttgtgtgaggaactaatggagaatcaagtaactgggcttgctgcttcactgtgctgtgctgtacaaaacacagctggtctttaaggctgagaaaacacaatgtcaggtccttgccagctcaggttggctgggatcaggatgacttgatccttctgagcccttcagtttcagtggaaggagaggtgatttttttttccatcccaggtgcctgggagttcacctggagagtccattatctcatcaaccatgtgccaaagagatgctctgcttttccgttgcttctcgatatttcctggcagcagccctctgccctcaacccccttgattcctgcctctctcagtgtaaacatgggatccaaaaagcatagggcacaagggaggaaggaagtaaatccagggtccatgatataggagaggggccactggacaaagggatgacatagctctcccatatcaattttccctatttaggacaaaaagaaggcctgagatgaaaaagtaattttctcatgattcctttctgccttttggcagcttgagttttaggaatgcaaaaacagaacaggtttttccaattgctttgggcagcagagtgagtcccaaatgtcacatgactgagctcttccacttcttgaaattagggccagctgcttgacagccagcagctaagggatgtggaggtgccagttggtgtatgggaaacattaaaaacccaccaccctaactggtttgtggctcctttgggcattggaagcagaaagaaaggagggaagtataattgctttattctccaatgattttctttgaaaggaatctgtgatttaactataaataaatgagaatggccttttaaatatctgctatgtcaaaagctgtacatccctgggagcattaaacatcattaaaccctatcaatgtagtcatcttgatgacatgcttattccagatctttgctggagtaggccttttctataatcgttacttctttgtcttcagaagccatgcataaaagcccatgcattcatcagagaagaaacaaattaagactaatcatatctagcatgtcaattactataattgagctaaaacccataatttaaaaatatgatttaaaaatatgaaacatagaagaggaaacacttctcaactcaaaacccaactataagctgagaaaaaaacatgtttaaaacaaagtgactcatagaaattcaatataaaaggatgggaaaatgcatgacaagcaaatataagttaaaagaaagtatgggccaggcttggtggctcacatctataatcccagcactttgagaggacaaggcaggaggattgcttgatcccaggagttcaagaccatcctaggcaacatagtgagatcctgtctccacaaaaaaattttttaaaaattagccaggcttggtggttggtgcatgcctgtggtcccagctactccagaggctgagatgggaggatagcttatgcctgagaggttgaggctgcagtgagctgtgattgcaccacagcactccagcctggacaacaaagtgagaccctgtcttgaaaaaaaaaaagtatgaatctctatttttgtatcaaagttaaagtaaaggcacaaaaaaagcattaaatgaaacaaagaatgacactttacaattttaaagagtaccacattaatatctaacaaatatgtcccatggcctttgaaggtatgaagattttttgtttgttttcattttttgtccagttctttgctgaaaaaaattagaatttattgggagacttaaaaactcaggtgatttcaagttttaaagaactctggatttccagtttctcttaaagaaatcagaaagtctgacaatactgagcctggattttcatgtagcatcaatcatccaggcagagtaaagcaagccagggcctgtgggccaaatccagccccctacctgaagaaatccacaccaaggaaattgatgccaacacacctcataagcgaaatccagaaacttagaacaaagaaaaagtctgcaaaagattgaaagaaagataacattttcactgtaatttctccttggaacccatgaaagccagaaggacatggcataatgtgctcaggaaaagaactgtcaactcacaattctacatccagtgaaaatatccttcagaaataaaaggaagagcaagacgaagaaaaggaaagaaaagtaagagagtggcagagtgctttttttaaaaaataatctaaaataggtaaaaataaatgaaacaaaaatctgattctttggaaagatcaatgaaattgagaaacctcaatttcaaaatttacaaagaaaaaagagaaaggaaacacctattaccaacaccagaaatgaaccggaagatatcattacagactctacaggcatccaaaggctaataagagaatactacaaaccacactacaaacataaaatagactatttaaatgaaatgggccaattcccccaaaggcacaaaccactgcaaaagatgaaatagataatttgaatagccttgttaactatatgagaaattgaattttttaatttaaaaacttcataaaaagaaatctctaagctcagatggttttgctggagatttctaccaaatgtctgaggaagaattaacactaattctataaaatctctttcagaaacatagaagaggaaacacttcccaactcatttttctgatatccaaaacagaaaacaacagtacaaagaaagaaacaacaagccaatgtctctcatgaatatagccaccacctgtttttgtagataaaatcttcttggagcaaagccggacccaccgtttacttattgtctaatgactgctttcacacttcaatgaccgagctgagtagttttgatagaccgtatggcccacgaagcctaacacatttaatatctggcccttacagaaaagcttggctgattagatctagggctgaaaagctattgacccctttacacgggacacacacagtctctagtagttagcagaggtcttccatttcttagtgtcttacatctggccagtatgaatcatctgtattttcatttaacccttgcacatactggcaaaattgttttatagccatcctttttcttaacctacaaaatacaaccctagatgtgtgtgtgtgtatatatataacatttttgctgaaattgtttgtggctaatttgctcattttcaaaaatttgaaatgtaaaataaagattctgcttccaacaactatggaatgacttatagcagattaacgatcctgctgaaaataactaggaaagatggataacattcataaacatttctgtgaaggtattggaagttagccaaagcagttgaacaagaggggcccagattcaggtgagaaggaaaataccttgaagtgaggtttacgtgttatgctcccctcagggaatttgcaaatgtacatcatgggtcatagagaaccaaatgaggttgcttggagcttgtagcagttatactggactaagggtaaaacttgagcttaggattaccaaggcagccaggacgtgaggtgccaatgtcccagagcacagtaaactggagagaaataagcctcacattctaagtgctatttctacttgaagcagttactgattactaaattccacatgcctagagcgctgatctaaaaaaacaagcagaaaatagtagcttagaagataaaaagctaagcagaggtttcagcagtctcactgctggagagacaaacattgaaattcagagcttgccaaggaggaggggcctggcgaacatcctaggcttttagttgagcctcatcaggtgctatgcactaggattaaggtgaccagaaattgaccagctctcacaaagcctgaaacagagctttcatccgttgttggatgaaaacacatgattttcatcccttgttggatcaaggtgatgagactaaccatatttgcttgccagaagaaaattaatcatctctggagaaagataacatcacctagaaccactgtagtttttacatacaatgtctgacagtcaattaaaatgacctgatataccaggaagcacggccaatcaacccagtcctaagaggaaaaacagacagtagtgagacacagactttaaaataaatattataaatatgttaaaaaacaaatgaacatatagagaatttcactagagaattggaaatgattttattgtggataaaaagacgtagaaatttataggttaaaaaataacataagaaatgaagaatttaataaatggatttaatagcagattagacacagaagaagaaatggctagtaaattctcttttaaaatacccagattggagcacagatactaaaataaagaatggaaaatatagaaaaagtataagaagcctatgaaaatttctgaaattggctagcatgtgtaattggagtgccagaaaaagaggagaaatggtgttagggagaaacagtatttgaaaagatgctggttgataatttccaagttgacaaaaggcatcaattcacaaattgaagaatctcttacactaagcgaagtaaatgtaaagacagcccaacctattaaaattgcagaaagaccaagaaagtaaaaaaatgttagaagcagctggagaaaaaagacatattatattcaaaggagaaattatatggccaaaagctgtctttcaacataaactatagaagccagaagataataaaatgataagtttaaagtgccgaaggaaaaaggtgctaatatagaaaactacacccagaaaaactatcccttaataagtgaagatgaaatatagacattttgagaaagaattttgtagattaaaaaaattggaggttattcattttcattttgtaaaagaatgataccaaaaacttggctagaaaggaaaactataggccaatctctcttacaaaaatatgtaaaaatttaaacattatactagcaaatcacacccagtgacgtataaggtaacacatcatgcaaatttgcctcctggaatgcaaatttggtttagcatttgataatcaaataatgtaagtcaccatgttaacagaataaagactaaaaaacataataatctcattggatgcagaaagaatatttgataaaattcaacacctattcatgataaaaaatcaccttacaaactaggaaacaaagggaactttttaaatttgataaaggttatttataaaggacttatagcaaacatcctgcttaatggtgaaatattgaaagctttcccgctgagatcaggggcaagataaggatgcttacaaataccacctattttcagtatggcatagaaggtcagtgcaataaagcaatgaaaaaaaaaagcctttaaaaatggcagatgaataaatgaaacaattactatttgaggaagccacatatataaacactatttgtgcatgtacaaaattcaaaagaatctactagcaaacaattagaattaataagtaaatttagcaaggttgatggataaaaggtcaacatagaaaaatcaactgtatttttatacagtaccaataattacaaatgaaaaattttaaatgacacctcttacagtcacaccaataacttaaaaaatctagaaatatgtctaaacgagattttattatctttgcatagaacaccataaaaattattgtattagtttcataggtctgctgtaacaaattaccacaaattagtgccttttaaggcacaaattagtgccttaaaacaatagaaatttattctcttactgttatggaggtcagaagtctgagccaacatgttggcagggacatccaccttctggagtctccagggggaactctttccctgcctcttccagcttctggtggctccgggcattccttggttgcatgactttaatctcttcctccatcttcacatagccttctcccgtatgtgtgtgtgtgtgtgtgtgtgtgtgtgtgtgtgtgtgtgtgtgtgtgtgtgtgtgagagaaatctcctgcttttctcttatcaggacacctgacattagatttaagacttatgctagacccaggatgatctcgaaaaattttaaatgtcaagatccttaacattagttatatctacaaagactcttttcctgataagtatgacatgaacaggagaaagggaaacactgggtagaagagggtggttccctggcaaaggcacaaccctcaagcctggagacccgtggccctaagtgggaacaggcatttctgttttcacacccaaaaagttgccttttggccctccacacgccctatcctgtacccatataaactccgaatcccaggctccacaagcagacaagcagacagatgagcagatgaggagacaaggagatgaggagacaagcagatgaatggtggaatggcatgacagagaagcagagaagagaaggaacgtctaaacactgagaggagtccggctgggtttggttgaagaagagtttggccactagatggccaaactccaggagaagatcaacttcccactccatcccccttccagctccctatccaactcactgacagccacctccagcactcagtaaaactccatgttcatccctcaagcctatgtgtgacctgattcttctgggatgctgggcaagagctgaggataaagaaagctgtcacattggccctctgcccttgtgaaaaggcagaggtgtccattgagctggttaacacttaagccatctgtggatggcaaggctataagagcactgtaacactggggcctcagacacccacccctagatgccaccatggggccagagcccaaagcactcaccccggctcttgcacctacctgtttgtgtgctcctgctcctgtcaggggtgtgagcagtggcagagaccaaagaggggagccacacccctgttatatgtcttgtgagggcgatcagggaactctcctgtttcaaagtcccattcacaggttttgggtggaaatatcttttgggctgggggacccacaattctaacacactacaattttcaagagaaattagtaatactctaaataaatggaaaaacatattatagtcatagattaaatattgtaaagatggtaatgctcaccaaaccaacttatacatccaatatcctatcaaatctttgaagttttttttaaattgacaaactaattttaaaatttatatagacaagcaagtgaccaaccatgttaaagatgatcttgaagaatagagttggaggctctacactacagataatattattatgaggttacagtaaatatagaagaatgttattgatttaagggtataccaatggtagaggagaagagtgtgcaaaaacaattccatacatatacagtcacctaatttacaacgacgttacagcatcacagacagatgacatttttaataaatgttgctgaatcaattagatattcacatgggaataataatctcgattgcttactcacaccaaataggaaaatcagttctagaaaatataaaaggtaaaacaataaacttctataaaaaagagaaaatacttaaacttagggtggatagtagtttttaaacaggattcacaataaacgaaaggaaagaatatttgataaattggacttcatgaaaataaaatattgctgtttttcaaaagatgctataataaaagagaaaactcatttactgggaaaagaaatttgaaatatatatctaacaaaggacttatatctagtatctataaagaatttctacaaatcattaaggaaaaaaactcaaaaaaaagggtaaacaaattacttcccaaagagactatttaactggacattcaacaaagaaaaaatgttcaacgttattagtcatcaggaaaatgcaaattaaaactacatgagatactattagacacccaaatggcccaaattaaaaaaaccaaaaacgtaacctagtacgacatgcaacattattatttaactgtcattagtgtaacctagtacaaaaggcaatattattttttctaagaaaaaagagaatgagttactatttttaaaaattgttttctcttcatttctgtttactctatttcccccattcctgacttcctacttagccctttagaaatgcaattataacctcttacctcccctcaccagatacttgctgcagatcaagttcatgtaactatgtgcttagaagctccagagaggaactctcacccaccaggagactgccttgagagataatagtcaactcataacccaaagtatgtttgctacaaaactctctcccacccagagagttttcagccacctttacaacctatttctgcccatgaaaatgccaactctactgcccgataggtaaggcaccaatgtgatatgcaggccccgacttgttcatttccacctctgcatagactccctctttaaaagcacccactttctgctgcaaaagtgaagcagtaccgttaaggatacttaaggcaggaagcctgtacttcccctatactactttaggaataaaaagtcactttctttataccagacctcactcttgttagttagactctgctggtggtgagtgactgaccctgtgttttggttactaagcagtgttgagaacttggagtaaatggaatgttcatacaatactagtcagtgtaaatttatataaccactttgaaaagctgtttgtctatatctattaaacctatgaatatatgcatgccctactacccatcaattacattatttgatatataaacaatagaaataaaacatttcgtctgccaaaagaatgtatgagagatgttgacggaagcattatcactgtagccagaaagtgagaaaaacccaaatatgcttcaaattatgatggatatgatgtattcaaacagtggcatatcatatggtaatgaaaaattacaaatgagggctacgtgtgacaataagaaagtagactgaaatttttatatattgttaaatttcattaatataaagtaccaaaacagaaaaactaatttatagtaatagaagtcagaattgtggttttctttgggaggaaggctatgactggaaaaaaaaagtgaaaagccgggtgcagtggctcatgtctataatcctagcactttgggaggccaaggtgggaggatcacttgagtccaggagtttaagaccagcctgggcaacatagtgagaccctgtctctacaaaaaaataaaataaaataaaaaatgtaggaggttctaggaggccgttgagtgaatgtcttgccattgtaaaagtttcttgagctgcatacttaaggcttgcacatttcactatatttgtgtttagttcaatgcaattcatagaaaagatgaaaatttgccagtgctgaagagtcaaaggaatgttgctatgggccatggagttcattcccaaaaagtagtcccaaagctgttttgagatatgagaatcagaggaagatatttactttataagagacaatattcacttagatgttcagctctgcttgctaataaacaaaatctagtctcttacctacagacttattcaaccggtgttccttgagagaattaagtcctacagaaaatgctttgaatgactattttctcaattctcccatagatagtacagagttaggagcattttcgatgcaaacaagataagttaatacaatgcatgtcctaggatctgagggcttaattccctgcaggatccctggctgagaaggggtgtaactttagaatttctcctggaaaagtggtgaggggtggaggtggggaaaatgggataaattcctacccagttctccagcctgtcctttgacttagcatgaaggtaatttatttcctgataccagagagagtgttttcaacattgaaggagcaattgtgctgttgagaagtaatagtgtatttgaaagcttctttttccttcatttttaaaacactctttgagacattggctgtacttggatttcctttttcgcagctccgtagcatttgtttctgccagagaataatgttttctatttaggaatcacaactgaagaagtgtttgagtcacatatgattccaggggctattgtttgaggtctgcagatgaagtgaaagcaagaagataaccacaagttatcacaaatggctaagtgttttgaagagcagatatctactccagatcaccttcatttggtcatttttgaactcatacgaaggttgtattcccttttctttcatctcatacatccctactttcaccgtttagatcagacatggccagcataactgaggagcagactagaggccaaatctacttttgtcatatcctctgcttggttcatcagcctggctttagaccctaagagtttttaatcataatgatacaggaagggggcagggaagtgctgggtagagaagggtggggtccttggtgagggttctaccctcgggcctaagcccatggacctaagtgagaacaggcactcttgtttttgaacccaaatattgcatttttcaagaccactctggcccaccatgccccccatcctgtgcccataaaaatccgagaccatagcaggcattgacacaagtggctggacattgggaggtgcacaatgtccagaacacactgacagacaccagtagacaccagcaagccatcgatggtggaacaacgtggatgccaaggggtatttggccagggacggtcagaggtgagtctggctgctgggtggacgaagtccaggggaagaccaccttcccactccattcccctttctagctccccatccaccttactgagagctgctttcaccactcagtaaaaccttgcacttattctccaagcccacgagtgatccaatttttcctgtacactaaggcaagaacccaggatacagaaagccctctgtccttgcaataaggcagaaggtctaattgagctgattaacacaagccacctgcaggtggcaaagctgaaggagcacaatgtaacacatgtccactggggctttgggagctgtaaacactcaaccctagatgctgctgtggggttggagccccaaaacacaccccacgacctgcccatcttcatgcttcccctaggggtttgagcagcagggcactgaagaagtgagccacactcctgtttcatgccctgcaagggggataaagaaacttctcccgtttcagtggtgtctaacttggtggtaactatcatacaagactcacacagtggcgccttgatgcaggttgattcttgcatcaatttgagcagattggctgaatcagcacaggagatcagaaggagggaacaggctgctggacaagcacaagggagaagttgccttgctcctctggagggtcattcaggtgtgggcgatatgatccttcagcatcatggtctgcagacacttgtaggagaggatgcccgaaacctttcatcataaaagaaagaataaaagtcaacatttccatgagtttctggattgtgttaatgttaaagaatcctatgtcagtcattcttatgcagatcaggaaacccatctaaatcccctgtgtttgtggctcttggatttaagttattttatttgaagatcctaactcacttctaagaggcttgtgtacccacaacatcctgaatgttaaatatatagtagtgtgttggctgtgattcattccaatgacaacccatttaatttgatggctaagatatatgtatagaaacggaaaagagccttatgctgatgttatctatttaagacggatggcgattgcttgtgtccagcagccaaagaaagacataaatcaataatacattttaatcttacctttgtctatatcatttaataaacatttattggtactgactatgaactaggttctgggagaaacaaacgtaaaatataatcctcgccctcaagaaacactcagtgtagctagaaaaacagacgtgtaaataaataattagaatatcatgtaaaaagggtttattttaaaaatgcaaacaaaggcagggcatggtggctcactcatataatcccagcactttgggaggccgaggtgggtgggtcacgaggtcaggagatcaagaccatcctggctaacacggtgaaaccccgtctctactaaaaatacaaaaaaattagctgggcgtggtggtgggtgcccatagtcccagctccttgggaggctgaggcaggagaatggcatgaacctgggaggtggagcttgcagtgagccaagatcacgccactgcactctagcctgggcaacagagtgagactccgtctcagaaaaaaaaaaaaaaaaaaaaagcaaaaaaaaaaatgtcttctcatacatcagggaaaatactgtttttttctgaacataaagatgcttaaactgagtcctgtaagatgagtagaggaaacaagatgtgctaaggaaggactagaaagaccaagatgtgtttagggagctttaagtaattaggaaaggcgaggcagcaagaatgtttgacatggatgtggcatctcatggctgtaaccctagcgactcgggaggctgaggtgggaagatcacttgaggccaggagtttgagaccagcctgggcaacatagggagacccccatctccaaagcagaaacggaaccaaaaccccccaaaacaaaaacagaatgttacagacagagagaatgtgtgagagatagaaagagattaaggagagcaactgtgtacgtgtggctcacggtggtaaaagtgagagagtaaagcagatattgaagccagagagatgagcagaagacccttaaaaaccatattacagaatttggactttatcctttcaagaggttttaagtatggaggttatataatcagatttactacttagaaagatcctttgagaagtaatgtggaggtccgcttagagacaagagctcaggaactaagattgtggttgcaagaagaaggtgagatcaaattgacctgatatgcaaatcgactgaatacaaggaacattcatgaagctgaggaaggaatcgtaggctgacaccaaggttgtaggcatgggagggtgggtgggtgaatgatgagaacattgactaagctaggacatagataaggaggagcagggctagagtgggcagaagacataaggcatccataatttggaacatggtggaaaatgaagaaatttcttctccaacagagattgtgatttttctcatctaggttcaggactccttcgctcatttctgtattcctctagtttgggtcctaagttattctatttagacatacgtcttttgatttctggtttacttgtcctatcacagatactccttagttctcactatttctgatactgagtcccacaagggaagtgatgataatttcctctgcaggtggtcagtcagtaatccatttgaggtcactgtcgagaaacacagcatcaatgatcaattagatgctctagtgttgtagagctaagtgtcagtcttccagaatagtaaataaatgaacacacacatacacacatgtaggctttggaactgaatccatccatctctccatctgtttcaataaacgtttattgaatacctacaacatgtcattattttagacacttgggaattgtgagggctacaagaaaaagtaaacaaatgaagaaataatatacttttaagaataaaccagggtagtaggccatagaaatgggaggtcagttttagatagatggtaaactagccacccgtgcaaagatttagaatctaaatttagaacaatataagccccaaaatttgtgtatccaaggtcagcaggattggagcacagagagcaagagaaagagaacaggaggaaaaggggtcagaggtgggatcagatcctgtggcccttgtaggtcaagagaaagagtttagattttacatcaagaatgaaggggagccactggtagattctggtggcagagcaacgtgacctgatttaggacttgaaagtctcattctagttattggtcagagaaagggcccaaggcaacaagggcggaattagggagaccaggtgggagacaactggaaagatgagatagttcttggctgagtgtttccagttagagaaatgcaaagtgaggtcatcaattgggagagagctaccagtacacttgacatcatgaaaagtcatgatatttcaaactatgattaatattatgataatgaaagcaaaatgcaacatttatcaaatgtgtttcatgtgactttgctcctctctacaggaaggttaggacatggattagcttttctttttttaaatttatttttatttttaagttcccgggtgcgtgtgcaggatgtgcaggtttgttacataggtaaacgtgtgcactagtggtctgctgcacctatcaacccatcacctaggtattaagcccagcttgcattagctatttttcctaatgctctccctccccacatcccactccctgacaggccccagtgtgtgttgttctcctcctcatgtccatgtgatctcatgtgcagctcccactgtgagaacatgcggtgcttggttttctgttcctgcgttagtttgctgaggataaaggcttccagttccatccacgtccctgcaaaggacatgatcttgtttcttttcatggctgcatagtattccatggtgtatatgtaccatattttctttatccagtctatcattgatgggcatttgggttgattccatgtctttgctattgtgaatagtgctgcaatgaacatacatgtgcatgtatctttgtaatagaatgatttctattcctttgggtatatgcccagtaattggatttccaggtcaaatggtatttctggttctaggtctttgaggaatcaccacactgtctttccacactggttgaactactttacattaccatcaacagtgtaaacgtgctcctatttctctgcaacctcaccagcatctgttgtttcttgagtggattagcttttctaaagctacccttccagttggtggcacagctagaaccagaatgctggcctccttgctgtcaaagctgagcctctgcaagctgcttctcatcagccagtgagttcacatgctgcgtttccaagtgaaatttaggacttttttttttaattgtaaagtttgttaactgtggaatctctttcaacggtgtatttctactttctgaggttaaagaaggcagattctttcctgtgacacttgtttgttcttcatcaccattttaatttgcattagaatgtacatacactcaaggataatcttaaactcagtaagggatcttcagcagatgaacagaaatggagagcttgagggggcatctgggaatataacataatagaaatacgactctctcatttggaatcagcagtactctgagggctctgactgctggagttaactgtgtctacgcctcaaacaggaaaacaagcccatgagggcttaagaagggaaggttactgagtttttctgctctgtttagaactcctggccctcctcccttctagcagaagatcgtcccagcctgaagtgaggctaagaaccactgtaaaaccacttagaccatatatttactttcagaattaggtgatgacgtcagtccatgcttcggaaatagttgtttgcgagggaagacggctcaaccagcaaacacctaaaggtactgacgatcgtactcattcaaccagtccgtaccccgacccattacaaatgcaacccaagaaatgttgaaattatgttttctctcttcctctccagggcttttgaaactctctaaatacaagtttttagaaacgacgaggcattgaaaacttaccacatgaccttgtgcaagttgcttaacaccactaagccgccctgtcttctcagttttaatcggggataatattgcatcctcttaaagagtttttttgagaggatttgatgagaaactatgtaagtcacttagtatgctgcctggaatgtagcaagaacttgatcaatgataaactattatggaagtttttttgttttattttttttaatctttatcaattagttgtgattctttgatcctgtacccttcaacttcttttttttttttttttgagacagagtctcacactgtcgcccaggctggagtacagtggagcgatctcggctcaccgcaacctccgcctcccgggttcacgtgattctcctgtctcagcctcccgagttcccgagtagctgggattacaggcacacgccaccatgcctggctaatttttggtatttttactagaggcggggtttcacggtgttggccagactggcctcgaactcctgacgttgtgatccgcccacctccacctcccaaagtgctgggaccacaggcgtgagccactgcaccggccacccttcaacttctttaaaaagtcatgttggtttggtttcatttcaaactattctatccctctttaaaggtatttgaatgtagaacattgttaagaaaatgaacgaggatcttttctacatgagcgccatattctaacaaacttatcaaactgcactggtgttatgtgtgataagccacaagtctgggaatcctggcactagagctgtccaagggctgctgctgctggtataagcagctgtgaatctccaggtgatctactagtgccccgctccctaaaggagggaggtgcaggattttctctactaagggaaagcagccaggagaaaccatcttactctccctggagcattgggagagcatcaggcgtgttccatggacagtgagagccaatgaaagcataatctactcactgcatcctggggatcgctgagcttatgcccttgagcttcatagatggtgactcccagaatctctctgcaatgtccttggagaatggctgttgggtgatcgatgatgcaggaacttcacagttgtacagagctgtgtagtcctcccagggaggttcagagacttgcaatagtcaaagtacatgacttcttggagagtaaacgacaataacataagaatgtgtgaggggatataccacaaaattgtggcactctcctcctgcccctttcacggtatctggggtagatcttgatttcacccttttaatacttcacttataggtttttctctttttggttgatgtctacgattacgatgaatatttggggactggtggagaatgaaatgacctgtgtttctggaatgtacaggttgggaaatggctttatagtagagaatagagatgtagttaaagctgagaaagtggttgtgtttttttacaatcctgagcagaggttggcagggagaagaagatgaatagtaaatactatttttaattgagagtttactatatgctagatattgtacaaagtgttttggatgcattatcttatctaatcctcatgataagcttagagacagggactatgattattccatttcatggatgaggaaactaaaacttaaagaggttaaataatttgactgtggtcatgcagttattatatggtggaactgggtcttgaactgggactctaatatagaggctgtactcttcttaatgactgggctaaaaaacttgtggctatttacttagggaagtattggccaagtgtgtgttaaaagaacaaaatttagacaaattaaatttaacagagtttaattgagcaaataagaatttacgactcaggcagctgcccaaactagaatagggtcagagatactccagcattgtggcatggttggagaggatttgtgggcagaaaaaggaaaatgacattcagcaaacgaaagtgaggtacagaatagctgtactggcaactgctcagcgtttgtcctatttgaacatggtttgaatagttgactgtctgttattggcctaaacttggtgattgatataagactaggttatagtctatttatacatccagtgaggttacagttcactatggacagagaaacctttaggttgagcttaaaatatgcagggaggcagctttaggctaaacttaatttaacactttttttttttttttttaagagcagcacctacatatttgaatgcccttgactctgattaagctaccaaaggacagggactatgtcttattagaatgtacctggtccaaggcattagccaacagttggtaaccaatcagtgtttgtcagttgaattgaattgacaggttctatgtgacagttttttgttttgttttgttttggcaattccatttttattataggttcagggggtacatgtgcagatttgttacaacgatatattgcatgatgctgaggtttggaatattaatgagtccatctcccaggtggtgagcacaatactcaataggcagcttttcagcctctgcccgtctccattcctccccctcttatattctccagtgtctattgttcccatctttatgtccatgtatacttgatgtttacctcccacttatttacttattttttttcgagacagagtttcactcttgttgcccaggctggagtgcaatggtgtgacttcggctcactgcaacctctgccccctgggttcaagtgattctcctgcctcagccttccaagtagctgggattacaggcatgcgccaccatgcccagctaattttgtatttttagtagagacggggtttctctatgttggtcaggctggtctcaaactccaaacctcaggtgatctgcccacctcagcttcccacattgctgggattacaggtgtgagccaccgcacccagccagctcccacttataagtgagaatatgtagtatttggttttctgtttctgtgttagctcatttaggggaatggcctctagctgattctcattgttgcaaagaacatgatctcgttcttttttatgactgcatagtattccatggtgcatatgcaccatattttctttatttgatccagtgtggatgggaccctgggtttattccatgctatgtggcagtttttgaaagttagacttaaaaaattaagagacgttgctatcttacattcttgcaaacaaactaaaatccctaaccttcctcaagattggaatccaatgcaattaaaaatatttatttatttatttagttagttagttagttactaactatgcggtactggcaagggatcaaagttagaaacattgtcattctttccaggtgtttgccataaactgtaaactttccttggtcaagatgcctggtgtgagtttcgatgataagataaaactacaacttaaaaatatttgttgaaaaatgaatgtactccttgcaaagcctgacttacatatgtaaaaagacagcattggtggccaccaatgcaatatgagggacttaatctgtttaatgtggattgttacagtcaggcaattatcctgttattatcaagacctagagttgattggtaccaaactcagaactttatctatgactgtgtgagcttcagtgggtcctgatcaaaatgaaaatgggaggccgggctcatggttgtaatctcagcactttgggaggctgaggctggtggatcacctgagctcacgagttcaacaccatcctgtccaacatggtgaaacctcgtctctactgaaaatacaaaaattagtggggcatggtggcgggcacctgtaaccccagctactcaggaggctgaggcaggagaatcacttgaacttgggaggtggaggttgcagtgagtcaagatcgtgtcactgcactccagcctgggtgacacagagagactctatctcaaaaaaaaaaaaaaaaaaaagatgaaagtgggtttctttcactggtgtcctggcaaatgtttaaacaaatcactctcctaaaaacaaataaaagtcctggtttgtagcattggctggtttgcatgatgaaatactcctccatggctgatttcaactccactgaagatggagtagaaaagagacgcatacagtcatctctcttgaagtggtctgagtggtctccaatgaagtggtctccactcattcctctataccccgtactgaagtctgtctgagattctcttgcctccatttatgcatacaaatgacctgtttgattctctcctttttcgtggatgatgctaaacatctgccttctgtctgaaagtgcccccgacatgcccatttttgtggcttttgcctactgaacatttgaacttcatcagctggatgctcagcagtaggccccagattcagaggcaatgcaattttctgtgaggttgtagcttagagagggtagaagctatagcctgcaagatgatccccaatggactctgcctagtatttacatcctgtgttgtcttctctgcaccacacagaacatggcagaagcaatggcacatcacttccaggattaagttataaaagtcattgtgacttctgtcatggtcagactctctatcttgaattattcgctctgtgggaagtcatctgctaagtcacaagctgacctatagagagtcccatgtagcaaggatgaaagcctcctgaaaacagtcatgggtgtgaatttagaagcagattcttcagccccccagtgaagcctccagatgactgcagcactggctgacagcttgacacagcctcatgagaaaccctgggcccaaaccatccaactaagcagttcccgaattactgacacccagaaaatatgagatagtatatattggttgttttaaatggctaagtgttgggatcatttgctacacagaaatagataattaatgcaggaagttacttatttttaagataactattttgtcttttatagtaacatttaacctgcatcacttctaccagcatcactcaaattaaaattctgtccttaatttctttcaaaggagttaattaaaaaaattattcagtttattcttcccttcctctctgtattagtccgttttcacactgctgataaagacctacctgagactgggaaatttacaaaagaaagagggttaatgcactcacacaattctatgtggtcggggaggcctcacagtcatggtggaaagtgaaaggcacatctcaaatggcagcagacaagagaagagagcttgtgcagggaaactcccattttaaaaaccatcagatcttgtgagacttattcactatcacgagaacagcatgggaaagacctgcccccatgattcgattcctcccactgtgtccctcccacaacacgtgggaattcaagatgagatttgcttggggatacagacaaaccgtatcactctccctcctttttctttccctctttctcccttctcctctcccttctccacctcttccttttatatttcaatttcacattttaatgtatcttctatgatagcagtggagtttgataacagaagacagatgaacttttgcatgagtgatttccagttctggctgctgtatgatattgaataggtactaaatctcccaaagtctcagttttctcatctgtaaacctgcaataggaaaacctacattaacaggttagagttaagtaaaattaaatagacagatgaactttcacatgagtgatttctagttctggctgctgtgtgatattgaataggtattaaacctctcaaagtctcagttttctcatctgtaaaattggaataggaaaacctacattaacaggttagagttaagtaaaattaaatatgcaaaggtctaagcacagggtctggcaaataacatgcattccatagatagtataataaaataaccatgaagactacaataagggcagttgatcctctatcttgaagatgcctgagagtccatgtggcccaacgaaaggcttttcaaatagactgttgtgagaatgatggaagcaaagcatactcagtcctcatggtcatctttccagagtgagagtgagcagctcttgacaaactgaccggtggagatgaagccgtgttaaccggcagatgcagggtgagtggggagggctacaagctgaactctacaggcagcatttgccatcactcatgcttgaactcccagaatcctcagcctgcgaggcccaattcagtttagtaaacctttatgtgcttggcctacaaaggtgaatgggcatcaagccttgtggcaaggagaagatcatcataaccctttgtgctatattcacagggtgcatggagctctgtctctgggctgagggctcagagaaaagtgccccttgctaaagctaggctgcatggggtggtggtcagggagggcttccttgaggaagcaggcctgaaccaagtcttaagagatgaatttatttctttctctcttagcaggacggaactcaaatcattcaagttagttggattctgtcttcttaaaatcttcactaaggagcctcttttatttactttggatcctgagctttaggaaggaagaaacatttgagtaggattgtttctagatgtagatgttactggtcctgtaagtggcttggctttgttttgtttcattttctgggatttggggagagtcggttgattataaagaaaatatatttgatcaatagaaatcacatttctaacagaaaagaggccgattctatcaggtctccttgcccttttgggcttaactcttataattatttaaagaaaactaagattattatcctgataaaaaaagtttgcaagggccacaaactgaagaccagtcttatcgatggtccccaagctcacaaagaagccagaggaaattactcagcgtgggatgaccaccgttgcccagtagttttattccttctaagtcaatgtttttctgagatgatccagagtttgaaaactaacatacagttatattcaacaacaaattcctggccatgtagggtcattgttataaggtctctgacccctaaaacacttcaaacaaagtccatacctctttctagctcctatgggtatgaaagaccaccaggagtagtgtgagaaacgttagtgggtacaaagctacccactctcttggacaaataaaagggatgaagggtgtgttcctctgtgagaatgagggcttttatcattgtggagaaaagtcattgcctggagttggctttcatttggggctagattaaaaaaagaaaagctcagtgtcactgatcattagagtaatgcaaatcaaaaccacaatgagataccccttcacaccagtcagaatggcaattattaaaaagtcaagaaacaacagatgctggtgaggttgcagagaaataggagcgcgtttacactgttggtgggaatgtaaattagttcaaccattgtgaaacagtgtggcgattcctcgaagatctagaacgagaaataccatttgacccagcaatcccattactgggtatatactcaaaaaatataaatcgttctattacaaagatgcatgcatgcatatgtttattgtagcactattcacaatagcaaagacatggaatcaacccaagtgctcatcaatgatagactggataaagaaaatgtggtatgtatacaccatggaatactatgcagccatgaaaaggaacaagatcatgtcctttgcagggacatggatggagctggaagtcattatcctcagcaaactaatgtaggaacagaaaaccaaacaccacatgttctcactcataagtgggagctgaacaatgagaacagatggacacagggagcagaacaacacacactggggcctgtcagggagtgggatgtggggagggagagcattaggaaaaatagctcatgcatgctgggcttaatacccagatgatgtgttgacaggtgcagcaaaccaccatggcacttgtttacctatgtaacaaacctgcacatcctgcacatataccctagaatttaaaatgaaaattaaaaaaaagtaaaaaatgtagtggatttttaggaatatcccagtaatcaagtcacctttcaagaattaagggaatgaaaatggctggaggacatttccaaaggattaggagtgggagtcacctgttgatgccaaggctggaacagctggaggggcctcaaggggaccttgggagatgcctgtgtgcttaggaagggaagggcctatccaaagtccaagagagtgctatttaacccacgtaagctgatctctgctccttaatttcaggattagaaaactgctatgggatttggcttttgtcaaccattgggatgctttgggaagccacagaaatccaactatctctaagactaattctgtgaactctgaaattcctctgcatagtaaggtggactattggaggggaggggtggtcactgtctacacacctaactttatgttataaaaaaattctaattttattcagcatttccaaaagggtgctacagggaatgttactgatgttaaattaaagagtacagtgcaaaaaaaatgatctctgttcaagtaaattaagaaattatgtgattaaatagaattacattttttattttggataggatttctcagggctttccacctgctattctgaattatgtatctttaagagggagactgtgtgtatattgtaaaagtcagattctaatgtaaaagattctaatttcgggtcatggcagtaacactgcaccattggcacatggtttaaaactgcaggaacacagacattgatctgtgtgcttatgtaaatgtgtacactctaaaaaataaacaagcaaatactatatgtatacggtgaaggtcagcagtggcggggaaaagggaagactttcgtgggagagatttagggaggttagcacctttaactgaaggtaagagtccttcattctaattctgaatcactgcgttacgttcagcatatctggtcctgtttccccacatgcaaagcagaaatttaaaaagtaaagacatctcaaacttatcttgcaaaacaatacagggattaaacaagcctgtaccattaaactgttttgcactctgtggtcaaggacatggcctaatggcaggttatggtcctggccaccagcaggattaaccaaggggtttgcagagcaggcacaggcagtgtctgtctctccaggaccgcgggtagggcagctgacatcctggggtcagggtgagtcatgccctgtgtgcatgaacatgcaggcatgcgtgcagcaccctcgggctccaggggcttaaatttccaaaagacaaccctgaaaacttgaaaagtaagaaaatctagaacaatgagtaggtggcctagcttttgtggcaggcagaaacaagacaaaatggcgagttaaccatattcctattatgtgggggattttgtaggactgtccgagtgactatttgcttagagtaggttaaatcctaccaaagaaatggggctcccaagaaagcattcattcccaaagtgaattttcctgttgatagtgttggatatgtttgcagtattcacggtccaaattttatgctttctctttcccattgctgagtcactgggctgtcttgaaatctgaggggaaaagtctgtgaggcgtggccggcaactaggaagcctggctctttctagtagagcatgaacgccaccttgagttgtgtgtgagcactgccgagccctacttgacatgatcagcagttccgagggatggagcaaatgggactggttcccttttgcaacaaaaagcagcactatcaggcctgggttgtgtcttgacacccggaattattttttagcaaaatgtaataaatcaatcagagttccccagagaaacagaaccaagagcatatgcgtgcataagatggagaaatttattttaaggaattggctggtgcaaatgtaggggctggaaagttggaaatttgtaggacaagccgcaggctgcaaactcaggcaggagttgatgttgccatcttgaggcaaaatttcttccctgggaagtctcagtttttttctctttaggcctccaattgattgaatgaggtcgacaaattttatctaggatagtctcctttactttaagtcagctgattttggatgttaatcatatctgcaaaatacgttcaccgcaacatctagaccagtgtttggttaaataactggtactagcccaagtcgacacataaaccatcactcttggccgggcgtggtggctcaggcctgtaatcccagcactttgggaggccgaggcaggcggatcacgaggtcaggagattgagaccacctggtaacacggtgaaacccccgtctctactaaaaatgcaaaaaattagctgggtgtggtggcgggctcctgtagtcccagctactcgggaggctgaggcaggagaatggcgtgaacccgggaggcggagcttgcagtgagccgagattgtgccacggcactccagcctgggcgacagagcgagactccgtctcaaaaacaaacaaacaaacaaacaaacaaacaaacaaaacctaaccataactgatagcaacattagcataggtgaaaaatatatttttgaacattaacagatataaataatttttcatttgattcattaatatggattcaacaacacttcaggttggaccaggtgcattaccatttctagttatattccttgtaacattgggttagattctgatgtgttgctaccagcctaccatatgcattgtatgacttcccccagtaccatcataacgaagacatgtagaatacgtttcatagtaaatagggtgttttcccagggttgctgttgttgctattgcaggatattcgcctgcaagtgtttgcaattctctaatcagaactctttgccatgcaaggtaaggcaaagtttaaaaggctggtcagagctccttcccaggagtgacaccctttgtcctttgacattggtatttttctgtccagtacttctggcagaagttagaagcaggaatgggtagtccggatagctctcctatttgaatctgttttttaaaaaaaagactccacaagactccacactattttgatattttgatgaattttctggggtttcacctcgtgtaattttttttttttttttttgagacacgatcttgctctgttgttcaggctggagtgcaatggcatgattacagctcactgtaacctcaaacacctgggtagctcctgggttcaagggatcctcctaccatggtttcctaaagcactgggattacaggcatgagccacgaggcccacaggcccagtccttcatgtgacttttgaaggaggcatctgtggtcttcaaacaccaagaatctctcctttatagacactcagaaagcacggaagaggaggataagaaatggccaagtctcttggtgtttgctcttgctggaaagaaaaagggggaaattggatttctctgggattctctgttcaaatggcaaaggaggaaaaaatcccagagagtctgctaaggaaggaagtagaagctacgtcatctctatagacagcagagaggacatatttattggtgtgtatctctagtttctgcaactcatccagccagatatttcaatatttccctaactccaactgttcactgtccatttccattgctattgaatgtgctaggtatattttcctaatataaacacaaaatttaaaaaattatcctatgtaccatgtgacatagtcttgcatattatagtggttcacatcataactcatctgtttgaaaaactctaatcagatgcatacggttaattcaaaatgtgctgtgtgtagaactgctatataattgatgagcattagaatgatgtgacactctacaattctcttttctcttaggtttttaagattattaagattaatgtcattcaataggtctgagtttgcatgtgtagcaaagacttgttctccttaaggcagcagtggcttgcaaactttttgaaatgcctgtagtaacacatttattttatttattcacaaatgcatacatattcacagacgtaatataatgaaagtctcattaaaactagaatgtaatttttttttgaggcaaagtcttactctcactctattgcccaggctggagtgcagtggtacagtcacaacccactgcagcctcaacctcccaagctcaagcaatcctcctgcctcagtctcctgagtagctgggaatacaggcatgcaccaccatgcctggctaattttttaatttgttattgtttgtagagacagagtctcgctatattgcccaggctggtctcaaactcctggacacaagcgatcctcctgccttaacctcccaaagtgctggatttacaggtgtgagccaccatgcctgccccagaatgtaaaatgtttcataaataataattggtttttatatcaattgcatcttggaatgataaaattttggacatatgggaaaaataaaatgttattaaaatcaattttacctgtttcttatttatttatttattttttaagagacagggtcttgctctgttacccaagctggagtgcagtggcacaatcagctcactgcaaccttgatctgggcccaagcaatcctcccctagttcagcctcccgagtagctgggactacaggggcactccaccatgcctgggtaattttttaaattttttgtagagatggggtcttgctatgctgcccaggctggtcttgaactcctggcctcaaacgattttcctgctttggtctcccaaagtgctggcattacaggcatgagccactgtgccctgccctttaaaacattttttgaatgagactactagaaaattaagaattacaaatgtgctcacattatattcttattgggtaacactgctgtccaatatgtaaaaatgaagcctggaagttctgcaggcatttcactgtcacggggagtgtttgttaccctgaacatggaatggatacggagtggaggacaaagctgatggaactgtggaggaatggaagcagagccatgttccaactgtacctgaaacatttcatacctcaagtcgtaagaacaaataaatatgatttattgttgcagctggatctcctgctacacaacaggaaaatcctaactgatgctgggtcacagaatacatcctggctcatcatttcagacttctactcaagagcttttatgatgctgctctgtcgactcccataagacctcccaaacccaggctccaggctgacatctcacagttcctcaaggtggaccatctccttctgtctgaccaaccctatttatcatcctccttacatgctgtgctcattccttcaatgactcattctacacttttagctactcatggactattgaacacaaatgtacagccacttccagggttttctaggaaactttgtatcactcactttcactttctgctgggtcagctgcaggtatgaatttgttcatcacagatttagaccaacctggggtggcagcacattctcaagatgttttaccttggtccatgtcaatttcattttttcttttacttctttgttgttgttgttgagacagggtctcactctgtcacccaggctggagtgcagtggcacaatcatggctcactgcatccttgacctcccaggctcaagcgatcctcccatctcagcctcctgagtaactggaactacaggcacatgccaccacatcctgctaattttttgattttttggtagagatggggttttgccatgctgcccagctcaagtgatccacccgcctcagcctcccaaagggctgggactacagacatgaaccaccccacccagcctataatttcatttttttcatggcaaattaatatgttggcattggattatgctttggccccctaagtagctcactcgcaggagaaaattcattgactaatgaaatgggtacctagtgcccctggaagttgcagtactcattggaaattttaaattctaaattaccattttgattttcatcatcactttggagtttccagttaatgttgtccactcatgaggctcagattttctccaaatacataaacagatggggttcctgagcttgtactccacagctgagggccaatctctgggtcaacccagattcacatttatggcgttctctcctggggcttcttgccaggtgacgacttctgttcctagtgacttgtccctgtcttgcctcttgccttttctccacattatccccaaactcagcctttagctttgcccacactattgtgaagccacacaaatgtttgcttgtgtacattctataccaaagactgtcctgatatggactagataacactgggcaatacattattaatttgtgatgtgtccaagcaatgacagccagtggatgtgcaatggtattacccaggaatgtcagctacaggctatttgtttttaatgcagctcgcatcagagggtctctgatctagttaaaaagacccctctcttctcctagagggcaccacagtaatcaagttgtcaagagctgagacagccagggattgagtatcagctttactaattgattcattcagtaagtgtctactgagcacctgccacattttagatattgttctttgtgctggggatttatcagtgaataaaaaagacaaaaatctaaatccttgtggaacttactttctaggagaaggctaaccataagcattaacaatgaggaaattattatatttggaagcgatggatctatgggggaaaaacgcccagggaagggggagaaaatgaggttgcagttttcagtagggtggacagggtaggcccctaagaagataacatttgggcaaagacctgaggaggtgacaatgcaagctgtgagatacgcagtggaaaagccttccaggtgcagagaacaattcctgtcagagacacaggaattacaaccaggtaagagatgatggtgcctcagaccaaggtgatgactgcagaagtggtgggaagcgctcatattctagaaaaatcttggaagtagagcctcccatacctctgaaacactgaatatggaagataagagaaaaagcagagttgaggaagggcacggtggctcatgcctgtaatcccagcactttggaaggccgaggcgggcagatcttttgaggtcaggagtttgagaccagtctgactaacatggtgaaaccccatctctactaaaatgcaaaaattagccgggtatcatggcaggcacctgtaatcccagctacttgggaggctgagtcaggagaatcacttgaatccaggaggcagagcttgcagtgagccaagctctctccactgcactccagcctgggtgatggagcgagattccctttcaaaaaaataaaataataaataaataaataataataaaaataaaaaaagtaaaaagcagagttgagtatgattccaaggatttgggaccaaattcctgaagaatgacacttcctttaactgaaatggagatggctatggttagagaaatttgagggagccaaatcagaaatttaggtttttacatgttatgtttgagatataatgtaagtaaagatcttgataaggtggcttgctgtattattctggagtttaggggaagtctgacttagaaataaagattggggagaaatcagcatatagatggtatttaaaaccatgaggagaggcaacataagaaaaggaagattctggaacagaggttcttggccacattggccaagggttctcactaatcccttaatgaagaggatctgaattttcacaggagaacttaagtatggcatgtgtcttagtccatttagtgttgctataaagacacaccagagactggataagttataaagaaaaaagacttactcggcttagaaattctgatgtctggaaaagttcaagattgggcaactgcatttggggagagctgcaggctgcttccactcctggcagaaagtgaaggggagctggtgtgtgcagaggccacatggcgagagaggaagcaacagagaaaaggggaggtgccacactttttcacagccagctgtcatggaaactattaggctggtgcaaaagtagttgcgatttttgccatgaaaagtaatggcataaaccgcaattacttttgtgccgacctaataatcaagagtgtgaactcacttacccccaaggtagggaattacagcaataataaaggatccaccctcgtggactcaagcgcctttcactaggccccacctcccaacacaaccacattgcagattacatttcaacattaaacttggggaagaggggtacccatccaagctatagcagcctgtcagtcagttgtattatttgtgcttgtaactataagtggaatgtatacagaggccttaatcacctgagtttgggatgtttccttggccgtgtatagcttacttccttaagtctcagttttcctatctatacaatggggttaattataactcataaagttattgcaaggattaaatgagaacgtgtaaaaagagtgtttagcacagttcctggaaaaaaatacgtgttcaacaaatgttagctcaataaaatagattttagtattctttgagtcaagattctgctgttcagcgtgggagacacaagaacacagttgtctttgtagattctgtcttagcgaggtttattctgtttgaatttctataggccataacaaaaatagatggaacagatacaggacaaaaccacaaactatttaaagaaaaccctgcccgaagtaatgtatgtattcatgccaaatatattcaggtactaaaaggtctatggaaattttgaacaagaaataatgaggatgatgatgatggaaatgatgaagattttgataacaattaaatttacagagcatttacaatgtgtcagacagtgtttgaagtatcatatattcactaatttaagcctcacaactctatgaggtaggtaccctcatgttacagtagaagacaatgagacacagagaggttatgtgacttgtccaaggttccccagctagtaagtggcagaggtggggtggaaggaaggcagtgtaactccagtgtccggggaaggacaaggatgaatcttggcatttgaagtcattcttcttttttttttttttttttttttttgagacggagtctcactctgtcgcccaggctggagtgcagtggtgcaatctcagctcactgcaagctctgcctcccgggttcatgtcattctcctgcctcagcctccagggtagctgggactacgggtgcccgccaccatgcccggcgtagaaacggggtttcactgtgttagccaggatggtcttgatctcctgacctcgtgatccgcccgcctcggcctcccaaaatgctgggtttacaggcgtgagccactgtgcctggccttgaaatcattcctgaaggaagcagaggggaagagaatgcttctgttagtactgagcatttgttcaaaactggaaaggacataaaaatatgcttagggaatgtgaagattctcatttgccttggtgaggcatttgcatagggataccaggaataattatgggttatgccagattgtggagggctttatggttcaagatcaacacatttggccttaattttatggctaatgggcggcacagacttgtgttgcagtaagattaatttgaaagggattatctggggcaggcactgtggctcacacctgtaatctcagcactttgggaggctgaggcgggtggatcacctgaggtcaggagttcgagaccagccttgccaacatggtgaaactccatctctacaaaaatacaaaaattagctgggcatgttggtgagtgtctgtaatctcacctacttgggaggctgaggcaggagaatcacgtaaactcaggaggcagaggttgcagtgagcgagacggcaccattgcactccagcctgggcagcaagtgtgaaactccgtctcaaaagaaaaaaaagaaagaaagaaagaaaaaaaagaaaaacaaaagagagagagagagagaaagaaaagaaagaaagggattatctgaacagcttgaaggagagtacaagaagaggtagacagattaattatggggctatttctgtcaactggaaatcgtagcctaactttgaggctgggctgctgtaatggattgagtatatagtgcaaaaacacagaggtcccttttgcattgcgatccatgcacggctctatgtaggcacttgcttggggggcagaatgagatggtgggaaagcatgggattggagtaacgcagaccggggtgcatgattgttgctccacgtctgatgggccaggaagccctgggaaagttccttaaactttccaagcctcagtttcctcacaggattgttgtgaggatttttttttttttttgtggcgattgaatgacattatgaaaaattcattagaattcactaaatacctatcccgtttcccttttaatcctttctctgctccacacttcaagagtgttggctctacgaaggaagggacatatccctagaaaaacatgacgtcaagcaggatgagccattggatttggtgaattgctgggtgtgggtgacaacgttgagtcttggaaacaatagtactgtttatagatacaggaaaggtgggaggaggagctggccctctaaagcagattttttagttttcatttattttgagacagagtctagctctgtcacccaggctaaagtgcagtgatgtgatctcagctcactgcaacctccacctcacaggtttaagcggttctcctgcctcagcctcctgagtagctgggattacaggcgcccaccactgcacccacctaatttttgtatttttagtagagacagcgtttcaccatgttgcccaggctggtctcgaactcttgacctcaagtgatccacccactttggcctcccaaaatgttgagattacaggcgtgagccactgctcctggcctaaaacaaacttttttttttttttttttttttttttttaaagggctcagatgtaaaatacttagggaaccctctgaaaatctcttttatattcacagaatatgcatgagaagccttttctcagaaacctgacctaggtgaagacttacacccacatttagatatttgtaatttaagatacagagttaaactccatgtatttgataattatgtctcaggaactcctgaagtttttgccttctggtttttgacttcagcctagttttccctgctggctaacagaggctactctgcatagagtttagcactaattactttgcctcaatattttctaatcgatccactgtttttcaggctatctttagcttttgataattcccttcattttttttttaaagaaaaaaacccatgtattatttcttatattttctctgaaacttctgttggttaggactctatgaccattgaggtaagtatttattttcaccttcatagtgattttacttaactgaagtcatagagactaacatcatgaaatcctcttaatttaaccttgcattttttttttcttttttgagatggagtctcactctgtcatccaggctggagtgcagtggtgtgatctcggctcactgcaacctccgcctcccaagttcaagtgattttcctgcctcagcctcccgagtagctgggattacaggcatgtgccaccacacccggctaatttttgtttttagtagagacggggtttcaccttgttggccaggctggtctcaaactcctgacttcaagtgatctgcccaccctggcttctcaaagtgctgggattacaggggtgaaccaccgatccaggcctaaccatgcatttttaaagagttctattataggtgatatgtggggctacgcatcaggggagacgtagcttcttattttctttcttttttttattatactttaagttctagggtacatgtgcacaacgtgcaggtttgttacatatgtatacatgtgccatgttggtttgctgcacctgttaactcattatttacattaggtatatctcctaatgctatccttcctccctccccccactccatgacaggccccagtgtgtgatgttccccttcctgtgtccaagtgttctcattgttcagttcccacctatgagtgagaacatgcggtgtttgtttttctgtccttgcgatagtttgctcagaatgatggtttctagcttcatccatgtccctgcaaaggacatgaactaatccttttttatggctgcatagtattccatggtgtatatgtgccacattttcttaatccagtctatcattgatggacattagggttggttccaagtctttgctattgtgaatagtgccgcaataaacatacttgtgcatgtgtctttatggcagcatgatttataatccttggggaaaatacccagtaatgggatggctgggtcaaatggcatttctagttctagatccttaaggaatcgccacactgtcttctacaatggttgaactagtttacagtcccaccaacagtgtaaaagtgttcctgtttctccacatcctctccagcacctgttgtttcctgactttttaatgatcgccatactaactggtgtgaggtggtatctcattgtggttttgatttgcatttctctgacggccagtgatggtgagcattttttcatgtgtctgttggccgcataaatgtcttcttttgagaagtgtctgttcatatcctttgcccactttttgatggggttgtttgattttttcttgtaaatttgtataagttctttgtagattctggatattagccctttgtcagttgggtagattgtaaaaattttctcccattctgtaggttgcctgttcactctgatggtagtttcttttgctatgcagagacatagcttcttattttctatacaggacctggaaggaaaacctgaaaaacccatgacactccctttcctgttagctgtgtggtgttatgaaatggactgacaggatttagctttcccagcaccactgaaggaccctcagcaacttcaagttcaaaatgtcctcaccttcgcctgattttgggaagtattgcatcaacacgtttttgcaaaaagaatggaactttaaaattttttcttggcgttctctttctctttatacatgagcaataaatgtgtgcagaagtcattctagccaacaagattgtcaggccgagacgggcagatcacgaggtcaggagatcgagaccatcctggctaacacggtgaaaccccgtctctactaaaaatacaaaaattagccgggcatggtggcgcgcgcctgtagtcccagctacacgggaggctgaggcaggagaatggcgtgaacccgggaggcggagcttgcagtgagtcgagatcgcgccaccgcactccagcctgggcgacagagcgaaactccgtctcaaaaaaaaaataaataaataaaataaaataaaaaataaaaaaaaaaagattgtcaccagctgtattaacctaaaagtagaggaagaatgaagaatccctgaaaatcacatgtgctgtgctgctgagtgatggcctttaaaacgttgagattcatacgccctgtagagggcaatgtttccccttgcctaaaatgttttcactattcgaaaagcatcagtaagtccaaggagcgacatcccaagagggcagaaattaagaaagctttctgggttcagtattgactgtaaatgcccactggagaggagaaatcatcgatgatagccttgactattgctagaatctcttcctttagattcctggggctagagttgaggatttcactttaagaaagattgagacagagtgaaagcaagagagaagcttgtaagaagaagtgggaggatgttaacagtgagagctgggaatttgctcatgaggccgagtggctaccacaatctccagtacaggctgaatgtgtgtcgttccattccgcttctaccctctgtaagaggcctgccctgttcacaaggccaataaggggttagattttaaggcttgttgaaaataaactttggtaatcccagtgcttagagcccagtgacatagaaaggagagccttcttcaacttttggagagcaaacttctagggggatgaggtgggaagtttacttgggggaatcctgcccagggcatcacctcagctttctgatccttggtttttttttttccaggatcccaaagagaggcacaaatggtgtgtccaagcttcagattgaactcctctgagacttttctcttctccataatcatagctagatgaacagaaggatgtggccaccacaaattcaatgaatgtgtatacctttagaatatttgtgattacacaagtccctagaggcaggtgggggcaaagacttctttgtaaaagtccaaaggtgtcttagaaatgtgcaaaagtacaagacttactgaggtacagaaagcaatggctcttattttcaaagggagcccaagaaaagttctttgaatttttcgtctggcccttttacttttcaaatttcttattttgtcacactttgtggttgtagcaatttgtgaacagaaagcatctcatcctttgctcagcatgggcagaagggacaatgagcacctccttggttgcatgtagatttttccatagcagagtgaaaaaagattggaaaaatttgttccagcatccttgcatggaagtaaagacttcccatgaaaccaaaagtatagtttctctctgacatctcttgaaataaacacttcttagtcagaactatccccccatagatggcactttaggttgggccaaaaatggtagaaaggatatgggatctctgcttccaacagcatttgacaattattctactagaaaaacacatgcacagtatgttgattgcagcactatttacaatagcaaagacttggaaccaaccgaaatgcccatcaatgatagactggataaagagaatgtggcacatgtacaccatagaatattatgcagccataaaaaagaatgagttcatgtcctttacagggacatggttgaagctggaagccatcatcctcagcaaactaacacagaaacagaaaaccaaatactgcatgtcctcactcataagtgggagttgaacaatgagaacacatggacacagggaggggaacatcacacacagggacctggcggggttggggggcaagggtagggagagagagcattaggacaaatacccaatgcatgtggggcttaaaacctagatgacgggttgatgggtgcaacaaaccaccgtggcacatgtatacctatgtaacaaacctgcacgttctgcatatgtatcccagaacttaaagtaaaaaaacaaaacagaaaaacttctcaggggttaatgatgacttttagtgcatttataagtatttaagaaagaagaccaataagagtaggttttcagaacgtggtggttaatctacttttgcttgaagtagaaaaataaaggagaaacaaatccttgcagaggagttctctgtgggagatgaaggtgaagtaaaagggaaaatgtggccagtttacgattaactttactcttgagaggtgaagcaaattgagtttccccagggggatttgcttaacccttaacaagtttcagccaaaggaaaccatttgtgaattcctagaagattattttggcactctgtgggcggcaagccacccaggtgccaaggcaagagatcgagggcacaagctgttccagtataataaagaaaatgcatagaataagaatagttatactagaaatagattatagatatgattatatgtgaatatcattaatcattagtttgtagcattactctttattccaatattataataatctttgctctacaattataacctaggaaaaacgaggccataaagagataggagctgaagggacacagtgagaagtgaccagaagacatgagtgtgagccctctgttacgcccagacagggccaccagagggctccctggtctagcggtaatgccagcgcctgggaaggcgcctgttaactagcggaccttggtctagcggtagcgtcagtgcctagggaaggcacccgttacttagcagaccaggaaagagagtctccctttccagggagagttagagaagactctgctccaccacctcttgtggagggcctgacatcagtcaggcctgcccacaggcatctggaggcctaaatgtctccctgtgatgctgtgctttagtggtcacactcctgtttcactttcatgttccgccctgtacacctggctctgccttctagacagcagtagcagaattagtgaaagtactaaaagtctttgaaatgcatagaagaaataatggcataagctgtcctctctctctctctgcctctgctgccaaacagggaagggccccctgtccggtggacacgtgactcatgtgaccttctcaatcactggagatgactcacactccttaccctgccccttttgccttgtatctaataaataccaaacagccaggcattcggggccactaccggtctctgcgtcttggtggtagtggtcccctgggcccagctgtcttttcttccatctctttgtcttgtgtctttatttctatgatctctcatctctgcacacgaggagaaaaacccacaaacactgtaggtctggtccctacagcactcaattttcctctttccctaaaaccagaaaatacaatgtcctatgccagtaacccagaaataaaaagtagttacgtctagtatagagaatatacaaagaggttccttgcaagtttaaagttctaggaaaggcagcaaaaaagaaaacatgattgatttcttttttatgattcatgagtattacaacttcttaaggcagaggagtttttctaagatactgcaatccatgttttctgattttacagagaagaaatagaaatccaaccctttctggaagaataatcctatgagatttaggtgaagacaagatttgtgttagaatccagctcttcaaatatggcttggttgattcacttcctaaatgatttatgaagaagctgatttttcattcctgttgtcataactacaagctgtgctgttgtttcctggaacttagtttttatgggcaaaggcttaggaaaatggtctataaaggccctcagcagttcaaggacctattagttcagtctcctctctgttctcctgccatagaaagttgtttttggtgttgtagagcaattgtgcattggtctcagtgttgaggcctgtttctcctggttctgggaagtcataatcaataagaatgaaaacctcatatatctgcttgttgtattagcagaatttcctgtgatgtgttcagctccttgagatctcattagatgtttctctatataagtattccttggccaatgaagtttgaacattttgaagttaagcaaatttaatctgttattcctttacttccaaatttctcagattctttataagctcatgtgcattgtgaatctcctagaagacatatataacatgaaacatttctccaaattttgggtacagatgccctttttgccaaacatcttgagggactagtgtcccaaagaacatactttgggaagtgctctgttacttcaacctgtgcgttaaaaccaacttctcctgttagacatctagtccccaaaaagcctacaaattaaggttttaatgaaaaaatgtgttaagtaatagacaaagtccaaggatccacctcataacaaatcaggtacatatttaagcctatgtgttttcagatcatgttcctttaaaaaccgtctgtattgatgtgtttcatagagaatagccaattcacaagacatttccctgtttttttgaaatggttaatagtttttgaaaatatttttctcaaaaaaatcttaggcatatttggaagtgtgtgttttatgtcagctatctatgtctagaatagaccaccagcatagtgatatttcaaccacctggaaggcaaacttttggatattagttgtaagtgtgtgttataaacccaagctctttcagattaaaaaaatgctgatgaattttgttctggtgaaatacgccagctccaggaagaataaagtatgttcaagcatccctctctcccctgctcttgttaagagaggcactgtttagagaaggaggtttcagggcctgccagggccgcagagctgaactgaacctgctgatgagacatacttaggtttcatcattgctttgatactgtggggctcagagtctggcattctctgcctcctaaggttttgatcttccatgaagcttcactactaggtagatatggggctgtttccctcctgggtaaacctgcgttctttcttctctatttcaccctgggaaggcctggaatggatgatttaatctaggttcttttgaaactttgttaattatgggactctataacctgggttagtctttccttgcctcttctttcccacagatattggcttaggttaagatgtgggttctagggaaaacacatcaaggagatcattccattttctgttttttttttgtgcgtaaagcagaggcacgagaggcatcctggtgtctcattcatagaaagagttctgcataggggtctgggcccaaaactcggatgagttttatagatgaaggggtttctctagagtggctcctttgcacgaatcctgtatcaatcttcagtcatcataagtagacagggatttcagatcctggatctttgttctctctttcttaatctctctttattagagttacaaaagtagctgtgagtgtttcaggcaactgaacaacaactgatttacacatctgctaaggttggcagctaaaagcgtttgagaaagttcccgatttgatttcccactccagaggttgaacctacatcagagcaccatgagtaattgctctttagtacaaacatgtgcttctaaatacataagcaatgagcttttgaagctgtcccatggtttaatttgaattagttcaagatgatacctccggggaggcccagcaggcagacatttcctgccccacttccctggtggggcagaatcactgctgggaaggcatgaaggaaatctgtcactttggtttccaaatttggccagaaggtggcacaatctgaaaacccttttctgcatctcagtggaaacaagggctctgtgtttttcacattcaggtcaaagattccaagtagaactggaagaagaccaaatattgtaaaagactataattcatatcctgaagattcttgcagtccttgggggcatttctttgggagggcttgggaaaaaaataaacaagcaaaagaaatctcatatgtacactctgagaattttagagacgattggccacgttctttcagagaaaggtacaaaaacaaagcacttttatgttgttgtaaataacaagttgggatagggactgggagaaggacttttcatttcctttctggaaacaaacagctttatgattgcagctccatgacctttcttgctgtcctgagggaatagaaacttcctgacttctacaattggactattagacacttctgattttcacggaatttaagaattggagatgatttttgaggacatttggtccaaactttacccggtgcagaagttgatcttgttatctctctgactgataagagaaacaccacctatttgcaaacctcggtggggtcaatagtacattcacccgtctttcacttcatcctcatatctgcatggcgagtttgttgttttcgttgtgctactgacatcattgctaataatgcttattgggtactttctttatgaaatccattcattaaaggaatattcatttaatgattatttacctggggcttcatgtgccaaacaatgagtgaaacagattacatgccttatcttattgaatcctacgacgagcacctgagacaggtgctgtctttatctcccatttgcagctgaggaaggtggtgcttagaaagattaagtaacaaaggttaaggacaatgattattgtctaaggaaacacagctcaaaagcagtggtagtggtaacagggggcttgttttgagccatgtttggctgacccagagttcatacgctgaaccacagtgttcttgagtctactgaagtgtgtgtcgatggcctggcagggatccaattctctcacctgccacctgagcatttttatttgaatgtcattagacacatctgtctttcaggacaccaggatctatcctgtgctcttcagttcctctgtctgaggtctgttccttcctccacatgacatctcttcaaatgtttgaatgctatgatcgtgtcttaatgttaattcccttttttttaggctaaacagactcagctttccaactgccctcctaaaagacatgacttttttttgtttttgtttgtttgtttgtttgtttgttttttggagacagggtcttgctctgtcacccaggctacagttcactggcacaaacacagctccctgcagcctcgacctcctgggctcaagcaatcctcccacctcagcctcccaagtagctgagactatagatgcgtaccaccatgcttggctaatttttgtaattaggaaaggctcctggacccgaatgcccatgtctctgcatattaccctattgtacacatttgttatttctttttcacaatgaggaaaccaatgttttgggtaacttaccagaggttactaagtatgggggttcgccgtgttgcccaggctggtcttgatctcctgggctcaagcaatccttccaccttagcctcccaaagtgctgggattataagcttaagccaccatgcccaacccaagacatgacttttgagcccttaacccctttgggatactgtttgtttatttgtaggtcttgttgtcccttctgtgactttctgagacttgcaattactcattggacatttgccttccccgttagactcctgctctgtgagggtggaggccaggtcttttctgtttatcacagacctccagagccttgcttggttcccagcatggtgcagctgtttaattgatgaaataatgaatctccaaaatgggattaattatagcttctcttcttctttcataggattgttgtgtgaaacaaacaacacaatgcatgtaaaagtactctgtcgtgctaaaacatcatgctgatgccattaccaagagattcattgcatatcaaaagtcatattgttgattagcatggaatgcaaaactctccatccattcattgattcattggttcattatttatttaaaagctactatgtgctcacgtaatgtattttaaagtccttttttctctaagtttccctggttttcatccctcctgttgtgtgtagatccagagccacagactcactgcttcatgcttctaggttcagagccaaattctacccattagctgacagaaaacatactttctgcttcttgagaatttgcacattgccagaccctgagtctccctgctcctaagccacggtcaggggtgctatgtcagtacccctgatgggtagagtgtaaccttacaataaatgctgctcttcatagagagatgtctactagtgctctttaatacttagtccctcaacagtgggcagtgtggtccaggaatctttccttatcagtgatgatcaatgataatcacattcagttatttgatcatgttcctgccttaacttttaccctggaggacagagacatgtaactggacccatggaataggctcagggtcttataagatggcaaagcatggaagttttatacacggaccctggggtcagattcatctttgttccagtcctaccttcactgttcaatatttaggaacctctgataagttacccaaagcatttgtttcctcattgtgaataagaaataacaaatgtgtacaataaggtagtatgtagaatagggtaattgtgaagattaaaattaaatactgcacttaagtaatttagcatagtgcctggcatacaataagttctcaataaataataataaaagagaagcatcaaagaaggagcttctggtttctggtgtctcaatgcctgggagtttccacgggtcccaggaaacaggtttattattaagaacatcaagcaccatccttccactagtgcaaggcttctgaacagaggcgctattgatattttgagctggataattctttgctctgggtagctgccctgtttagattgttgctggcctttctacaccacataccagtagcatcaccctctgcactgcccaagttgggacaatcaaaaatatttccagacattgccaaatgttccctgggaggcaaaatccctcctggctgggaatgtctccattagaccagaaacagattgctgaaacatggcttgaacatattgtaacatattcagctgttcgtgtgcttctagatcaatactacaattttttatttttattttttgtcccctctattgccgcaatactgaaaaacacgccattacatatgaacataacaactaaatatatacttaataataacaataaaagcaaatattgaataagaattattaaaatattttatattgtaaatttatcctggaattataaaatagatgcagtcccttatagaatattatcaatttttaaaagcatttttgttattttgttttttatatttaaatattttatgtaatttattttggtgtagagtgtgaggtctggatccgccttatttatttatttttttagatggttaaactttgtcttaacactacttgttgaataatctgtgttttcctagctaacttgaaatggcgttgtatcctattaaaaaaattctcctgtttccctggtctgtttctgggctttctggttcattctattgatgtctacttatggatgttccagctggtgactgctgttttagtgatttgttgagcacttactgttctctgtgtgtggttttatcttatttttatttttttgaaaaacttaagatataaatctcttaccctaaaactcactattttaatgtacatgattcagtggtttttaatatattcaaaatgttgtacaactatcattattgtctaattactggacctttccatcacctcaaaaggttagcagtcgctctcaactctcccctaacaccaccagtccccctaccagtaactcacaaccactaatctttgtggttccatagatttgcctatttagaacattttagataaacggaatcacaccatatatagcctttgtatttggcttctttcacttagcataagattttcaaagttcatctacattttagcatgtatcagcacttcattcctttttatggtgcagtaatattccattgaatgattatgccacagtttgtttatgcattcatcaattagtagatatttgtgttgtttgtactttttggttattatgaataatgctgttatgaacatttacgtgcaaacttttgtttgagcacacattttcaattctcttggattcatatccagtagtggaattgctggaccacatggtaaatcttaacattttgaggaggcaccagactgtttaccacagtgttgaaccattttacattctgactagaaaggcatgaagacttcaatacatccacatattcaccaacattattttctgtttttatttatttgttgtttttattattgttgttgtttatagccatcctagttggtatgaagttgtatctgattgtggttttgatttgcatttctctaatgtctaataatattgagcatcttcttatgtgcctattggacatttgtatatcttgtttagactaatgtctattcaaatcttttgtgtattttaaaattgggctatttatcttcttatgtcaagtttcaaattttaaaaaatatattctagatattagacccttattatatgtttgatttacaaatattttctcttattctgtgcattctttgttcacttctttgatagtgttcactgacacacaaaagtttttaattttgatgaagttcagcttgtcagtttctccttgtttgtgctttcggtataatgtttaagaaaggtaactaagatttacacctatattcctttttaagagatttctagctttacctcttacatttacattttgggtccattttgagttaacttttgtatatggtgtgaggtaggggtccaattttattctttttcatatggatatcttaagctgccctctcgtcttgtacttttgtgttgagaaaaggtctatcagagtcttggcaactaagcaattttcaaattaggaatctgattacttaaattcagtattaaacatgtgtagctggaaccatgatttggatgccaatttttatgaaacagactctcattcttacaaaccccaaggactcttaaatcatcatgatggcttttctgtatagaattctgaggcttcagatgatgtgccagtggaggagccattggctaggacagagacatcttttaggcagatggagattttggctgaaatggcatttgaataatggaatgcggcttgcagggatcttgcaacattgagtcctgggactgaagagggataatgtaatgacatggtcagttcatggcccaagttcagggagggcagcaggctttcctctggggagtgtctctcttctttcctgcatgccataggcacttaaaaatatgagacatatcagactcagaaacatgctaaaaattccaccatttccagaaaaggagatgcagagattaaagtgagtggcattaagagattttattcttattcagtaataggtaagcgcgctctctctctcccttttattttttatttcattttattttttaatattaattttttttgagacagagtcttgctctgtcacccaggctggagtgcagtggcatgatcttagctcactgcaacctccgcctcttgggttcaagcaattctcatgcctcagcctcccaagtaactgggattacaggcatgtgccaccatgctcggctaatttttttttgtatttttagcagagacaaggtttcaccatgttgctcaggctgttctcaaactcctgagctcaggtgatctgcccgcctcagactcccaaagtgctgggattacacgcatgagccaccaagcctggccactgtttcttttcaaaacacaatgaaaagtcaggtttctgagagctttggtggggatgccccatttttacagccacctcactactcttaaatttgattactattacgtgtccaaaattaaattaggatcaatatttgtggcaagtccccttcatctctactgacaaaaaagttgtcattggagagtggttaaaatgtgaggcctccttgacccttggggctcagcccaaaaggtcccacacagacagatcctttgaataaggttaaagggctatttattcctctgacttgctgtttcatatgaaacaaatgtgaattgtcctggcccatgtccaagggtctagaatggaatgttgtgtcaccccttagggtgataggagttaggtttccatgaaatgaagactgcccatctgccaccaaatgccagtcctaagggtgtaaccttcctagagaagggaccacttgttccctttgcataaataaagcccatgctatttatgtggcactgtgtgccagtttctagcagggctgaggggacttcagcgtgccacagtaggacagcgtccaaggcaccagctgcccacgttctgcggccattctgagaacacagtggctttaaacattggatagaaaggtgacaaaggaatgaagagccagggactcttttttaccctctgcataaaccaaaggaacccctttattctgagaacttgttctgttggctctgagacttttttcccagcctatttctcccagtcacttatttgttcattgcaaatgacaataaacatctgagtggcatttattctgattactgttttaaatttctggtagaaaacacagacttacagctttagtaaactcctactgtgaaagaagtatttattatctttactcaggtatcataagacaccatgtcctggcatgcagacataaatacatgcagtcgcccctgctatctgatgtttacggcaacagggattaatagttctgttattctccagctaagtacaaacataataacagtttgggttaatatgtacagttttacccccacaagtgaggttactaaagaaacaaacatactctgaacatgcggcacatgattttagaaacaagattctcattttatctaaaacacagaccaatactgcagttgagatggagggaatctcatttagctacctgaaatacctgcagtaccaaaatctaatttccagcctttttgaaaaacaaagcccaaggtctgttattcactgatcatattttaaatcttgactaccaccaacttttgttacatgaaacggagatagccatatatcttcgtttaaattttttatgctttagaattttatactttgtgctagaaatcactgctcttaaaccacatgggctaggtttaatgttcataatctgtctaccttattacatacagcttgaaatacttttctacctttttttctgttttcctccactgaattcaaatacatttattaaattaatagcccttgaaaatgaaaaaaaatttgagataattagcaagcagtaatgtctatcactgtgtgtcagtaataatgaagtttccatagtagaagcttgaagtatctgtgaattgtcataaattgtttttcaactctagggaggtgatgatgatggtgatactttggctaacatttattgagtgctgaccaggagccaaatacatgctaataataggctttctgggttttaccttatttaatcattatgattggatgataaggtctggaactcttatcagctgtatatcacacatgaggaaatggaggccggagagccttgggaacctgtcccaaattgcctaaggagtaaatgactggaccaagtggtctgagatcaagatctgccctcttcatctaattccttatatgtttaccagattctatagcttataaaatgctcttgggtcttttattttattgtgtactttgcaagggatgatatttagcattttgtaagcaaatattggtgatcggaaaccacatctgtatttaccatccaaacaactgcacagtaagaatcatttcaagaagccatcagctgttctcctctagatgagatttgtctgtgagtgactgtggacgatgatagaaccacatgccagcccctgcaacacactgataaagtatgtggatccatcgaatagtcagtagctgcctttgcaaagatggcagaaattaaagctggactgaagctggagaatgtgaaagcaacactggctcataaacggtattctgggggaacctaacgtaattcaatggtagttgcagatgaggaagtgaatggtgagaatgggctaagttaagcattggcttcacattcagaagtgtgtccaggggtctagagaagtcactggtaccagtctcatggggccatgaatgcgagcaagtggggaagatgtctccacaaccctgaaggtgatttaaccagcatttcctgcagagctccaatgaaaccatcaggtggctgtattttccaatccacattctttttagtattcctatcataaccaaaccagagcaaaacagctttaatatacaagtatggctttgctgtttcttttccttccttccttcctctttccttccttcctccctcccaccttccttcctccctccttcctttcctcctaccttccttctttgctccctccctccctcttccctccctccctccttccttcctctcacccctctctccctcccctccttttccttccttccttccttcctctcctcccctccctacttccttcctctccccgctctctccctcctgttcttttttccttccttccttccttccttctttccctccttccttttttccctttatatatttttaaaggcatagtggaaagatccaagactttggagccagatagcctactatgcacatcaggctcagacacttatgaggtatctaccttgcttttttaagtctcagtttctttatttaaaaaaacgtgaaattactcaaccatttcactaaggcatcaaagaatagaagaggctgattcctggtatataagcagttgcttaattaatgatgtttgttttttatttcttctttccctaaaaaaaaaaaaaaaagactctattggtgagaaatctgaagtaaatagcatactcttcaaaatgaggaccatttttttaaaacatttagtgaataccaactgagcatcagatgctggagttacagagaatctgatggttaactgagagagacatcaagtcagagtagttcggataatctccccagtgtgtgaagcgcagtgagagcccagagaatggggctgactcctgccagagagattacagattcctccctcagtgtgaaccacggagaacaacctggtgttggcaggagaatgggaagtggatgaagatatatgggaagagccagccaggtgcatgttgtgtgcagggaactgtggtggctggagatgaacatcattgtcatgaataggttaagaggtcaagctgggaaaacaagaggcaagagatgttccaacatcttcttcacagctctgtgctcgtctatgctaatgtgggcatcatgttactaacaggaacagagcataggagagcttcaccatgctttgaggacccttggtgaggctgcttcatttggctagaacgtgtgtgagggggaaattgagactgaagctccacactcagagcgaaacaatgacaaaagcttattacacagtgcagataaatggggagacagcacccaaagaggggtcttcaaggccaaagtgggggatgtgaaaaatgaagttagtcgtcatcagagacaaataagcagaatgcatgtgaagtcaaatattgggtttgggacacgcaggtttgcaggtatgggagctggcaccgaggccaaggaacacctgattgtgatggtcacaaaggtgctgagtaaatcaagttttatgatcttcagttgcatgtccagtctataatgtcatgtttcaacatggagattagcattttttggtgctaacatgtcagctatgactggctgttctcatgtatcttcatccacttcccattctgctgccaacaccaggttgttttctgtggttcacgctgaggggggaatctatgatctctctcaggggagtcagccccactctctgggctcagtgcatttcacacactggggagatgatctgagctactctgtgactcagtgtctctctcagttaaccatcaggttctctgtaactccagcatcagacattcagtggacattcactaaatgtttaacaaaatggtccttgtttgaaagagtatgctatgtactttagatttctcaccaataatttttttttttttttttggtaaagaagaacttggcacaaacaaacaggttagaagtagacccctaaagatcctaaactcctgccccagggagtccaaagatataggagaaccagacccacgctgtaagtctcccactcttttaaacaatttttaaagttttaatttttgtgggtagatagtaggtgtatatatttttggggtacgtgagacattttgatacaggcatgcaatgtgaaataagcacatcatggagaatgaggtatctgtgccctcaagcatttatccttcatgttacaaagaatccaattacactctttaagctattttaaaatgtacacttaagttattgttgactgtagtcaacctgttgtgctatcaaatagtaggtcttatgatcttattctttctattttttttgtacccattcaccattcccaccacccctgcaagtcccccactacccttgctagcctctggtaaccaaccacccttctacactctttgtccatgagttcaattgttttcatttttagatcccacaaataggtgagaacaagtgatgtttgtctttctgtgcctggcttatttcacttaacataatcatctctagttccatccatatcattgcaaacgactggatcttattcttttttatggctggatagtactccactgtgtatatgtaccacattttccttatccattcatcttactccattgtatatatgtactacattttcttcatctattcttctgttgataggcacttaggttgcttccaaatcttagttatcataaacagtgctgcaacaaatacaggagtgcagatatctctttgatatactgatttcctttcttttaggtatatacccagcagtaggattactgggtcatatgatagctcaagttttaggtttttgaggaacattcaaactgttctccatagtagttgtactaatttacattcccaccaacagtgtaaaagggttctcctttctccacattctttccagcatttgttattgtagtcttttggatataaaccattttaactgggacgagatgatatctcattgcagttttgattagcacttctctgatgatcagtgatgttgagcatcttttcatatatctgtttgctacttgtatgtcttctttttagaaatgtctatccaattttttggcccattttttgataggattattagattattttcctatagagttgtataagctccttatatattcttgtttttcatctcttgtcagaggggtagtttgcaaatgtttttttcccattatgtgcattgtctcttcactttgttgattgtttgctttgctgtgaagaaactttttaacttgatgtgatcccattagtccatgtttgctttggttgcctatgcttgtggggcattgcttaagaaatatttgcccagaccaatgtcctagagattttccccaatgttttcttgtagtttcatagtttgatgctttacatttaaatctttaaactattttcatttgattttttatatggtgagagatgggggtctagcttcattcttctgcatatggattcccattttcccagcaccatttattgaagagaccgtctcttctccagtgtatgttcttggcacctttggtggaaatgagttcactgtatgtgtgtagatttgtttctgggtcctctattctgttccattggtctatgagtctgtttttatgtcagtaccatgccatttgggttactatagctctgtagtataatttgaagtcaggtaatgtgattcctccagttttttttttctgttggcttagaatagctttcgttattctgggccatttttggtttcatataaattttaggatgttttttatttctgtgaagaatgttattggtattttgatggggattgcattgaatctgtagatttctttgagtaacaacagtgttctttaacaacactgattcttccaatccatgaaaatggaatctttttccatttttttgtttcctcttcagtttctttcatcagtgttttatagttttcattatagagatccttcacttctttggttaagttaattcctaggtatttaattttattttagccccccactcttgaggagatggggaaggatcctgtcactggccacatgggaaatgcagagtttgtagtgagaggtttccccttttccctcccctcactacatccaagaatgggagagggagagagtttccaagagaatctgtaataaagatgatagggagggtgatgcccagaagggagcacttgccttcctttccttaactggatttctgcttagacactgcatttgctgatctgttcctaaggaagaagaggattagaacaaactggtagggtggggagaggcatgagggaagagcagctgtactcccatccattttgtgccaagggtctgcagtgtttccacaggtcatgtggtgggccaccaaggaagtcaactgggcttgcaccatcttgactcccacaagagctgtccttaggatgaggggttgccagtagcaagaggccgtgggatgcacggattgctaatggcagaaactgggctggaagttctatctcttatgttaggaaattgggcagtggggagggccctacaggaaactcacataggtttcaaaagtgaatcagattttggaaacttgcctctcagacagcaatgaggcccggtcaatgctggtaagagatgtgttcacagttaactgagtgaggtctgcagcagcaaggtggttaagtagagacatccccatccatctcagaccttcaccttgattagccaacatcctagttcagctctgtgtttggggttgaggatttgaaagtttgtgaaaggaaatgataaatgactagaggggctcgtattcaaaggtgggaataagggtaacaagggatgagaaactggaaaggggaaggctgtggcagacccagggcaccatcatacggcacagactcggacacccactgtgggttgagtcagggcagactcatctggtttgcttggaactttttcagttttaaaagttaaagtcctttgttctgggaacctcttcagtcttggaccaccccgcacagttgatcgctcaatctgccaggaatcctagagtgacctctggcagagatagttatattactcctatctgacatctcaacagctcaaaatgggccagagccatcagcttatgtaacattaacgtgtggaccactggactctaagctgcaatgtggatcattaagagataagaggaagtattttttggctatcgctttcaaaagtctaaaaatatattaacagctgcaagaaatcagcatctaaagaacttaaaaacagaactattaataccattcaacccagtgatcccattactgggtacatacccagaggaaaataaatacttctggcaaaaagactcatgcatttgtacattcatcacagcactattcacaactgcaaagacatggaatcaacctaggtgcccatccacggtggactggctaaagaaaatgtggtacatgtacaccatggaatgctatgcagccataaaaagaatgaaatcatgtcctttgcagcaccatggatgcatccagaggccgctatcctaagcaaactaatgcaggaacagaaaacaaaatgccacatgttctcacttataagtgggagctaaacactggatgtacacatggatgcgaagatggaaatgatagatactggagactctaaaagtggggagggaggaaggggaaagggctgaaaacctagctgttgggtactatgctcaccacccgcatgacgggatcaatcataccccaaacttcagcattacacaatatgccaacataagaaacctacacatgtcctccctaaatctaaactaaaagtcacatccacgtaagatgtccaggttagaagaaatgtgcaaaacactaaattccaagctcagcagaaagattctggtaacaaggtgcatagccaatgcactcacttcagttgctgggcagtttcttgagctagtcctcacattctgagtaaggcatctcatttgttacccttgattaatatttttgagaatcaaatgaggcattgaacaacactaaatgctctacaaggcattaagaaagccaaaagcccttgacattttttttctattctttctccctcatttcaaaacaagacgttaatatcactccaagtttattgcgtaacgtaagggagtgggggaaaacataatgatttcaggaaaagaaaggatctgcaattgttatacaatgaggggcaaaagaagcaagagaacaaatgatgaaatctaattatgcagggtgtttcatcattttcaaaaattgttttatatttcacacagaactacaaggagaaagggtaaaaaaaaaaaagtactgggtaaggaaaaaggaaaagagagaaagagactccataagacctctagtgcctcatctatctggaatttgaatatatggcagttgggattatcagtataaacaggaataagaatcaagccaaaattattttgccatattccatgtggttataaataacagtaagtggctaattttgtatggttatttctgtaagccctgtaaagagaaggctttcatttgtaaatggaaggttttgaggattgagtttccctgttgttttgtggtttacaaactcctagacacatttatctacatggcaaaccttgaaagaagaccaaaattttagctatactctttaccatcattttcttctcataaactggagctgacaaaaagaaattgacactatacacgttgctattttttctgcatactgattctcaggcttggagttaatttttgcagggtaaccttggactgtttgttttatttcatctttctacttctctcagcttttactaactccggtcacaccaaaaacaaacaaacaaacaaaaaaacacacacacacaaaactatgacatcagaccaaagttacaaagttaccacaggtctaatcctattgctaggtagtcatgcttgctggtaaaactgtttttggcatctttatcactattcaccaaaaccgtaattatcaggtgacatctccaggtccccaggggtgggaccttgttgcatggcctctgctgcaggtcatctcagacacactgaggtttcctacaacttcctctgagccttcctttgttctttattgcagtaactggctaatgctagattccaaggtggcattcaaagtcaatcttcaaattccatgccaagtggagaaacatttaattctggggttgtttctagaagtaaagtttcattttagcaatcttggcttctctcagggtttctgacctgtgacaactggggtgtaaaggacaacaaaataatattacatttaagaacaagtgatgggattaaatgtttatttttcatctaaaactttaaaaaaggaagcaaatgagtaattccgtgctgccttttcacaatgtcatgtaaaatattgagtgtttttttaaataaaacattttttcccattgagtataaaatatacacacatgaattactgatttatttttttacaagacaacgtatattcatgccccagagcttctttctcctttcagatagaaatcccttctgggtgattcctgagtattatgtggatcactgtggattttggctgcaaaagagaacagagcatcccttttgtaaaagaagtatcaaccaatgtaacagtttctgcttttttgcttccaagttgctgagattgaccagaaggctggagcctaggccaccactgataggttatctcattcacagattatatcctaatgttggaagtttgcagtgccttgcccccagatgaagacccctcccccgcccagtgatgtgtttggaaaagtcttggaagtaattgctccttgattttttttttttagtttcaagtgaataatgcaacaaaaagcagaaatgtgaataatcccattgtaagtcactcgccttctggtggatttcggtcagggtcaaagagcaaacgggcaggaactgggctgtttgaatgagctttgtaaacaaggtcgtcatcaagccatgactcaatacacagtgaattatctgaagccttttagaattagcaactaacctccaggaaactggtgcatgttgcaatgaagtagctgaccatccaaatagcacaggccacagcaccatgggacattgcatttattaatcattaattaatttatttatttttgagacagagtctcactctgtcacccaggctgcatggcagtggcatgatcttggctcactgcaacctttgcctcctgggttcaagcaattctcctgccttaacctctccagtagctaggattacaggtgtgcgccaccacgccgggctaatttttgtatttttagtagagagggggttttgtcatgttggccaggctggtcttgaactcctgacctcatgtgatctgcccacctcagcctctcaaagtgctgggattgcaagcgtgagccaccacccccggcagggacattgcatttaatacagagggatcactcctcgtgtagtgtccctgaattcttccattgcttacaacattcaagtttccatgagtgaagaactttattctgcttcattatttttatttatccacttttttctttgatatgcagagtggcccaagagagcacaaattctaaaggttgacagaagagggagcacttgtaactttgaaataacaacaaaaaagatatgtttttccctttatataatagggctttgtctgtttttaaaaactagatcttttcccagctgcgtgtcgcaccagatgttctctttgtgaggcttgggcatagaaagtcctccaaggccccaggctctcattgcttccagaacacagccctactttctcccattctgaattttttttaacacagaacaatccattattcttaccaccatgtagtctgaaagtctgtataatcccctaagggtaggaaaaaacaaacacaaacaagctagaaagaagatgattgaaataaagtaaagagctggtaaatacgaaggcaggaaaagaggtaaccagggaagaagctagagaacaaggaagaggaagtgaagataatgggctgaaaagtcacaaaacaaaacagcaaaacaatcttcccctccccccaaactcttttcatatattttgttttccattatgcaaaacattaggtttgatgggctttattttcccgtcaaaaaaacttacagatgcaaacagaaagggaaagtaagacaaggagtgatccaggtctcggctcacatgcctttgctggcaggttgagccacacaaaatttccaaaaattaacccttgacctacagaaatagcaattttatatagtttgattcaatataattgccagtgagatgactgtcacatgcgtccatgtgaagagaccaccaaacaggctttgtgtgagcaataaagctttttaatcacctgggtgcaggcaggtggagtccaaaaagagagtcagcaaagggtggtgggattatcattagttcttataggtttgagataggcggtggagttaggagcaattttttgcgggcaaggggtggttcttacaaagtacattctcaagggtggggggaatattacaaagtaccttcttaagggcaggggagaatattacaaagtaccttcttaagggcagtgggtggggggaggatattacaaagtaccttctcaagggtggggagggtgtattgtcacaaagttaattgatcagttagggtggggcaggaacaaatcacaatggtggaatgtcatcagttaagtcaggaactggctattttcacttcttttgtggatcttcagttgcttcaggccatctggatgtatatgtgcaggtcacaggggatatgatggcttagcttgggctcagaggcctgacattcctgttttcttatattaataagaaaaataaaacaaaatagtggtgaagtgttggggcggtgaaaatttttgggggtggtatggagggataatgggcgatgtttctcagggctgcttcgagtaggattggggcggcatgggaacctacagtgggagagattaaactgaagaaagattttggggtaaggtatgatattgtggggttgttagaaggagcttttgtggtatagaatgattggtgatggcctggatgcagttttgcatgaattgaggaactaaacggaagatacaaggtccaaataaaagaaggagaaaaacaggtattaaaggactaagaattgggaggacccaggatatccaattaaagagtgtccaagggggttcagcataattctttgcttgtttggtgagctcttgggctctatccttgagttttttttttttatgttgtcatataccaggccagattgatttaggtaaaaacaacactgttcatttaaaaattaaccttgactatgcctttagctccagccacctctttaagaggaaattgttgggcagatgggggagggctagtcgtggaacaaaactgtaagccagacctggtatgaggaggggaggtgatagaaggattatagggtgggggagtggaggctgaggaagaattgggacctggctcggcctggtgaggaggagcctggggaggaggggagaggtcaaatgagtccatagaaaaggaggattcagaggactcagagcttggggtggagactaaaggaacagacaggagagaaagaagaaagatttgggatgagttgcattgggagcagagactaaggagggactgatgtgtaaatgaatgcctggacatcaggcacctcagaccatttgcccatttttcgactaaaattatgtaggtcttgtaggatggagaaatcgagagtgccattttctggccatttagagccattatcaagtttgtattggggccaagcagtgctgcagaagaaaataagacccttagggtttaggtcaggcaagaattgaagaggttttaaattcttgaggacacaggctaagggagaagaaggaggaatggagggtggaaggttgcccatagtgaaagaagcaagcccagagaaaagagagggtagagacacagagggtgggggtggtacttgccacccagaggaggtggtgcttgctaccaaggtgaaggatcaaggcaggcatccccatggtgatcagatgcctctgaatgtgggtgaataatcaggcaggcatccccgcagtgattaaacactaagggaagactgtcttcctgagttcgtgaccggcactggagttttgagttcatggataaaacacatcttctctgtctctaccagaaagggaaaggaactgaaattaaggaagagagagattgaagggtggagggatagcaagagaggttggcgaagagactgaaaagactgtttacctgatttgaaattggtgagatgttccttgggctggttggtctgaggacccgaggtcataggtggatctcctcatggagtgagggcgaggacaagggaactggtctcctgaaggagtcctcctgtcccagctcttcggcaccaaatgtcatgtgtgtccgtgtgaagagacgaccaaacaggctttgtgtgagcaataaagctttttaatcacctgggtgcaggcagccggagtccaaaaagagtgtcagcaaagggtggtgggattatcattagttcttataggtttgggataggcagtggagttaggagcaatttttttgtgggcagcgggtggatcttacaaagtacattctcaagggtggggagaatattacaaagtaccttcttaagggcagtgggttggggtaggatattacaaagtgccttctcaagggtggggagggtgtattgtcacaaagttaattgatcagttagagtggggcaggaacaaatcacaatgctggaatgtcatcagttaaggcaggaactggcaattttcacttcttttgtggatcttcagttgcttcaggccatctggatgtatatgtgcaggtcacaggggatatgatggcttagcttgggctcagaggcctgacaatgacaattttgggtactgagtatgtagaaagatcatatgtgttacgaacagattttaaccagtttggttattacaataactagcttctttctggtaaatatcataatataggtgatgtcctagcctgtggcctgtttgcatatggcccatgagctaagagcggtttttatatttttatagggttgtaaaaaaaaggtgaaagaatgtgcaacattagaccattttagcccacaaagcttaaattactatctgattgtttacaaagtttgcaaccgatggaaactccaggtgcacccagattgtttcattttattttttgctcttagtatgataatcacaacctattgggaactaactatgtgtcaggcactgttctaagaatttatatattaatctatttaatcttcacgaaatgctgtatgcaggttctattattattcatgttttacatacctggatagagctggaatggagatttgaacccaggactcctgcatgcttttaaacactatgttgaattgcctttcaagaagttcttgcagcttacacctgtaatcccagggctttgggaggctatggtggcaggactggggagggttgcttaagcccaggagtttgagaccaggccgggcaacatagcaagaccttgtccctacaaaaaaaaaaaaaaaaaaaagagagaaagaaaaaaagaggttgatacaagggagctgtgagacttgttcctgggggaagctagattgatttctaaactgatttctcatctcagctcttggtactcacctgttgagaatttttggcaagttatttaactgctctctgccttaatatctctgtaaatggaagaaaactgattttaaaaaaaggcaaatgattacaaagaaatgaaaatgagttgtatcagtggaatgcaaatgattattatccaatggatagatccttctcatgtccttttgtacagtcatttcagttttcctcatctgcctgtgtatgtatattctctggagttctctcttgaactggttgtaatctcttactagttcccttataaatcagtgattgaaataaattttttgatatgctattattttatatctatttaagggtcataattataaactccttttaaaattatcttttaacacaagaaactataattttccctcaatttgcatgtatactttccatttgattgggacattctctttccccttaaggcaaagccggaagtaacctgagaataggattttggtgtcagtctaatgttccctttaatgccctttgcacatggagacgctcagttcaactcttgagttgaaattatgatgaaggagacagacattctaagaaagagggttgatgaactaatttccaatcccgttttaaattctttactgtctgtaagaagattccttacaagacggaacatcagatctcacagatctctcactgaggctggagtgtagtggtcttttagtagtattgttatgttagtatttactggatgcttattatggagtgctaagtatgtacaaagatacctcattcagttatcactaaaacccaatgtggtaagcacttttatttcacagataaggatattgaaaagataaaaactccaagatgatgaaaggcaaagataatccagaagggtgcagtaaacaagacacgcagccatcttttacgttttttccccacttcaaaatcttttgtgtttttttctggtactttgttgcatgctttttcctttatccaatcccttttcccacctttcacttcagttgctagaataagacattctgaatttgctagatgttgtcattaggtccttatttaagtggttttgtaatctttgttttccacagaaatctttaaaaattctgtggcttcttgaccgggtctggtggctcacacctgtaatcccagtattttgggaggctgaggtgggcagatcaaaaggtcgggaattcaagaccagcctgaccaacatggagaaaccccgtctccactaaaaatacaaaaaaattacctgggcatggtggtgcgcgccggtaatcgcagctgttcaggaggctgaggcaggagaatcacttgaacctgggaggcagaggttgcagtgagccaagatcgtgccattgcactccagcatgggcaacagagcgagactccatctcaaaaataaataaataaataaataaataaataaataactgcaaaataaaaagtaaaaaataaaaaataaataaaattctgtggcttcttttccatcgtttgttcataacatttctataagaggctatcacattctgtaatgagagtgttcttttgctaatatcatttaatatttatgtatataagacagaatagattattgatgtagtaatatgacagcttcttatagaagcatgagcaagaagtaatgagcatgttcttttgcaattaccattttatatgtgtatgtatatatatatatatatagctttgtcgggatcgcttggccattatcataagaaaacgtgttttgatcagtggtggtgaagtatgttgtttatgtaagtgagtgaaggagatcacgaagtcaccatctagccatgcaagctcccaggggaccagaacaaggacgacaatgataacaacaacataaacaacaacattttatgagatttttcctacatcttgcaatgatgatgctattacccttcttcctttaagagtcaagtttatcatagttaatcttgttttcatttccatcatttcctcatctcccacttctttgctaacagtctgccaagaaagctgagtagcagacctcccagagagaatgatacaactaaccattttgtaaccatgtttgaggtaagagaaaaaaatagaaaaatacaattcagttcaatacattacacttggtcaagagcaaaagaaaagttggagaagtcagaaaaatcacttgcccaagagattaaaattgcaaaatagtttggaaaatagttggctaaatgcttgggaaataaagtagttagaagttatacctctaataaaggatgtataaaactaagaaataaaagagaaaaaggaggtagtagtagaatggtgaatattatatagaaaacatatatagaagtgctaaataatctggagatttaacattgatagtaaatcacacaattggaaaaaaaagaaagaaaagtggagtttgcagaaaagagaaatgtttgtacgatacatatctgatgaaatcattatttaatattttgttctgttttctgttaaaaataattatatattgttgtcaacactgaaagggtggaatgtataaaaatgtttacatgaatatttgaaaaaggcttgaatattttcaaggacaaaatactttatttctatggagacataattttagcaaacaatttttttttccgtagtagtgttgccagaaacaaaaggagtaaaaaaaaatttcttaaagttacttattactctataataggagttagcaaacttgttctatcaaggaccagatagcgactatttcaggctttgtgggcaatattgtctctggtacagatacttaactgtgctgttgtagtttgaaaacagccatagacattaataagtaagtgtggccgtgttccaataaaactttatttataaaaaccagttgatgggccatagcccatatagtttgccaactcctgacctagaattttatgaatctgtaatctagatgctttgtggtcatgagacccacttcattgccctcctggatttgcagctaaactatgtttttccaatctcccttgtagttagttaggtgtgtcgtgggattgggttctggctaacggaatacaggagaatgtgatatacacagtttctggttctggcccctaaatcatccctgaagaatcgccatagtttctccctcacctgttcctaatattgtaaccaacttaagttaggctgctcgccactgggaagtcaaagcatgagaagcgaggtgtggtccaaggaaagcagcttattccaatgctagcagatgggagaatggcccaggcttaactctcaaatgaaccatctcagattctgggctgagggcagctttaaaaaagttgagtccaggccaggtgcagtggctcacgcctgtaatcccaacactttgggaggcctaggtgggtggatcacttgaggtcaggagtttgagaccagcctggccaacatggtaaaaccccgtctctactaaaaatacaaaaattagctgggtgtggtggtgtgcatctacagccccagctatttgggaggctgaggcaggagaattgcttgagccccaggaggcgggggttgcagtgagctgagatcacgccactgcactccagcctgggcaacagagcgagacgctgtctcaaaaaacaaaaacaagaccccaaaacaaaccaacaacaacaaaaggggaagtttggtgtgggaaatatgcaagagtgatgcagggtgcaggtccacacgtcttgctcctatggctatcttcagttattgtcaacctggtgtgtcagctggcaccatctcagttgcagccgagctgtagattatccatcttgaagtggggagaagggaatttctccatacccccatacccagtttttttttgtttttgttttttgtttttttttttgacagagtctcgctctgtcgcccaggctggagtgcagtcgcacgatctcggctcactgtaagctccgcctcctgagttcacgccattctcctgcctcagcctcccgagtagctgggactacaggctcctgccaccacacctggttaattttttgtattttgtttagtagagatgggtttcaccgcgttagccaggatggtgtcgatctcctgacctcgtgatccaccctcctcggcctcccaaggtgctgggattacaggcgtgagccaccgtgcccagcccccagtttgttttaaaattagcccctggaatttcttaacaagcatatagttagataagtgtgcatggtgtggtgggaaaaggagggagagacagtgttctaaagtacatttcaaggccatattttaagactaagagggaaaaagtttttttacaatttgcttcaaggttacaccctgagactagggagaaaggacaaaaaacattttagaatgcacttcaaagctgaaatactcagttacaatatggtacagagcttttagaggacactcagaggagccacgagtcaggcaggagcccaagttctgaaacactgcttagaagggcaccagacaaacacctgaaaagactatgacgtgaatgaatcatcaatcttaattttgttaagtcattgatttttgcagttagatgctacagcatttatcctaccctgctacttggcacacactattgtcaagtagatgattttgagacactgaccaaaatgctagtaataaaaaggtgtaacagtattatgttcagcttcaggcacaagacagagtggcttagactgaaaggcatatgttagtctcacactacaggaaatctgggagtagacaatccttagttgtactgtggctcaataatgctaccaaggagcaagctcttgctctccctgctcctctgtccttaacaatgggcgctgcatccataatcagtaaaccattcaggcaggaaaaaagaggaataaaagaggcagcaacagcagacttctggttgtctcattggttggcatgaagtcccgtggacagttctggctgcaagataatctgtagctttctagtttctgcactagaaaacagcataaaaggaggaggttgtaactgacattgatgacagaatttacaatatagttcagtgtttgaaccacacaaaaatacttttggcaacaaaatgttttagctggtagacaaaacacagaaattgttattaaaacacctccttctaaggagcctttaaaaaataagacttggggctgggcatggttgctcactcctgtaaccccagcactttgggagttcgaggagggtggattgcttgagttcaggagttcgaaaccagcctgggcatcatggcaagggcccatctctaccaaaaatacaaaagaatagctgggcatggtggtgtgcacctgtggtcccagctacttgggaggttgagatgggaggattgcttgaccctggcagggtggaggttgcagtgaaccgagatcacaccactgccctccagcctgggtgatgagagtgagaccttgtctcgaaataaataaataaaaataaagacttaccaattaattaatagcagaacaaatcaagaaatgatagtttatgaagaaaaatttttacataaatagagtcgtaaatgggtaagatttactctggtgtctgtatttgcctattccgttactgtgttgaagttataaatactacaaaagtatagagataatttttaatatttaactgacagtgtatctctttttactgaacaaaatgttgttgaaataatatatccatgtcaattaattatttattctttgggaaatagaggatatacttcctaattaacttccaattttcatgcatttgtcttaagaaccagatcttcagagcatagaatcagtcaatgtttactagtatcaggaaaacatacgtttcttattttcaacatcataatggcatttgctaagtgaatgtactactatgtagtaaatttgcaatgacaagtccataaatatcctatctgagatgccaacaccttcttttgagtaaagaccccctgtataggttaagctttgtggttttctctgtgctagtattattctgaccacagttcattgtctcatcatcagcaccatggcttaaaggcacacatctgtagcctggatatgagagaggccaatgaccttagacaggagcttgaccctagagctctgaagaataagggaactccatactggatatggaaaaactgtctcagtacatgactctctagaaagtttctgaatgtgaggcacacagaaagaaggcaatagcagtaggaagaagttgaggcaataggacaaaaccatgaaagagaggctgataggagaatcttatgccttaaagaagagagcacgagttatccaaatcactctcaattgctctaaggtttctgaagcttattattcatgagactgaaagtgtggctgtggaacatacttctatgtaccattttaggatctccaaagggaaatcctcacccacctccccagaaatcacacttcttctctgactggctttgaaataaatttagaagcaaaacaagagagaagccagtagagaccaaaataacaccattgctgagaaaagataaattgggaactgttgctttgagacagagagagacaaatggacccactcagacagatcctattaggggttgaactgtgtacagcctccaaaactcataggctgaagtcctgaccctcagtacctcagaatctgaccttatttggaaacagggttgatgcagatgtaattagttaagttgggatgaagtcatactggagtagggtgggcccctactgtggtatgactggggtccttataaaaaggaaaaatttgaacacagacacatatataggaagaaagccatgtgaagatgaaggcagagctctacaagccaaggacaccagagatggtcagcaaaccaccagagaggcatggaacagattctcactcaccaacctcagaaagaaccaaccccgtgaacacctagaggatccagatgaagctgtggtctaacttctgtgaaactgaaaggctgcagactccactctgagctattctcagagtggatggctgcctcttaatcaaaatgagtggaatgtactaaaaatggaagaattcatccagtgggccaaattgtatgcaatggtgatggctgtgtaagcctccctgcccaaatatcttcactacatctttagggattcttgggatgtggcaagaggtctagccattgatcaggagataggcaactaaatgattggacattttttttgagatggagtctcactctgtcgcccaggctggagtgcggtggcgtgatctcggcttactgcaagctctgcctccgaggttcatgccattctcctgcctcagcctcccgagtagctgagactacaggtgcccaccaccacgcccgactaaattttttgtgttttttgtagagacagggtttcacagtgttagccaggatggtctcgatctcctgacctcgtgatcctcccgccttggcctcccaaagtgctgggattacaagcatgagccactgcgctcggccatgattggaattttaaggaatcccctgtgtgaggacaaggactatcgcaacaagttgttgcatagaatggacaaatctttgtcactcatgtggatgctcatgacaaaaccagcttttcaaatgagaacacaaatggaattccccagccaacggggcttgtgcgcaagttgaaatggccacccacaggtgcatcagcaaagtggtcacggaaggtggcctcgtgtgcagcaatcaaatccaggaacgtgaattttgaagacacagaagccaaggatgctatgcaaacagttttgcaattcctgccagggagcccaagcagtacaatgcacagagaattgggacatattatcacaggcattggcctggcttgggtttggcagattgatcatattggacctttaacacccagctgtggtttctgctggtgcttcatggcagttgacacttactgttgatatgaaactgccaaccccttacagcatgaggatgctggtgccaccatagtcatctcagagaaagatctttaccatatgtttgagtcccctagtggactccaatcagaccagggcacttcctttacagcacaacacataacaatgggcacaatcccatggcataggctgaacctatcatgctccataccacccacacactaatggagcccttgaagagtggcatggaagactaagagaattaaagaagggacaccagaaagcgttattagcaagatgctgtctgcctcactaggaccatttggatgttcagtacttcattcctgcgaaagggaagcatgcccttccaacacgttttggaataccgagcgtggcaggggtggaagacctggcagttgtccagttaggaacctgaggaaccccagtatacacaatcactccttatttttttcccctctggaatgctcttcctagggtggtttgtggtcctgcagcagttgtacctgacacaggccccccagctctgaacccatagaagatgtcttgggctcctacttctagtggttggcactgctgtgatccatgctattccatgcagagggaatctcacttgggattggcagttgggtcttcctgtttggcatttttgtgcagattttagagctaacacttcgtggtttcctcctctccagaattaatttccagccactactgaagccttgaactttgacctctgcctcccaaatttcagtaacattgctgttttcttcttaggctctattcccagacttggcaaatattggaaatttctcttaggaggaaatttgggtaaatatggcagttacctcatttgagtcccttctttcaagggtcatgttccatctagtttttgtctgctttgcttgttcttcattcctttaaatatttcccttacccttaccttaaaacaacttgtgtaattattatcatcaggaggtttaatctgacacaaagtgatagtttcatgattggaagtggcactcattgattaggatgtaagtggtacattgcacttggagaaataagacaggactttaaaatttggcatgataaattatttagtttctcaagtaaatatgagacattaaagtatttttgtgtttgaattaacttcagttacaggattgatgccattttgaacatgcatgaaaagctggaaagcacatggcttgtggacttctggttcctttggcagtaaagagcactttgaggacagcaacctgtccccagtgtagagatgaaatgtacttgtaagacataatgttaacacttgaaagctgccttccaatctgcagccattaagagtttgcaattctcagtctgttggaatgcatttccagctagtgcctgccaagaaacatgggtcagattctcagaagactgagacatttggtgccacccaggtggctggaagtggaaagcaattatcttatgggtagtgcagggccactgaatatcaagcttgtagaacgcattctggaattggaggtccatgggcatttgaaaaatcagatgaaaagatggcatcctttgaaaatttagcttggcaaaacaaaggaacagtagaaacatgttctttatgtcaattccagagaagtaatgcagggctgggaaggaaacagcttttgtaaaagactttagatgacattttgatgatttcaagctttcagggatttttgttgttgttgttaacttgtttttcagtttcgaaaaattggcaaaggactctcagatgtcccttctgggaaagttgtagacattacataaggcccaaaaaaagttgcaagcaaagcctttttaaaaatctaaatagcagcacacagtcaggagcttttttaattcttttttttttctaggtaagaatagctactgggtaaagaagaaggaagacaaataaggctctaagtcctgagacttcttgcaccaatgttacttgtaggtgtagctaatcaacttctaatacctagcactaagcctcattagatcttcccatcatgaaccaagagtgcccagtataagaatttaattaaaatcctgttgtgtttagaagctgtaggttgtgggaatagcttttactgtaaatcagatgatactcatattctgtacctatagtttggaaggtttgataggtccaaacacgagaaaacaaaatttaacatttactcagattactcttatagaaaattgaaaaattcttttatttctttcacatttccatattcctagctttaaggatgctcttgcttgacttgagataattttaatgaaggaatttcactatgagggaggtcttccctaaccaatcatttttctggggccggagataagatgaaaaatgtaatacactattccaaaatttgaggaactcaccctctaagcttgctgtcttcttttctgctctaggaatcctcatgaacttcacttggaatgcagtcagctctccatatctgtggggcactggtttcaggacaacccgcagatgccaaaatctgctatgctcaagtcccttataaaaatagcacattattatagtactgtattctctgcatgtggggaaggagaacctttttttgctattattgcctccaaatccattcctgtcccttcacccatgtgcacccagccctctttgcctgctctcattagtcctaagtgatctctttgccaagtctattctctgacccagctcttttatatgaagcattcccaaaatgtcttaatgttacactaagaagtggatttcagttcagtggatgaagaagaggaggataaaaggtaattttaggggaaagggtgattttggttcacactaaagcagtacatggaggcatcaggctccagagatacacaggggaaggaccagagaggacagtttagtttccaagagatagcaccgcaacttttctgagggctgactgtattttcttatttcctagagatgagatttgtcctactaaacttttattggaggtaaataatttccgtatcatttaatctctgcattttacaatatgcattcacaaaaatacaaatggataatgttcatagatttgtttttctatcctgtattggacactgactgtcttatttgctatgtttttggggtaccatgctgtccaccaggcaaaaaaattcctgccattccagacaacaaaagcttttgaaattgcctcataattttctgcctctgcaccttaagtcatgatgtttctttctgcttatatttttcccatctatcagcatccagccattattctgcacatgaatatgtgttccccagagtctctgaggacatgcaagtttcattattgtaatgccttattctagcctcctcttattcaactttttccccccatcacaacaaaaagcgagaggaaggttttggtgttattcttcgtgattcccatccagtcctcagattttcttgtttatttatttatttatttattttttctctatcaccaaggctggagtgcaatggtgtgatcttggctcaccgcaacctccgcctcctgggttcaagcaattctcatgcctcagccttccgagtatctgggattacaggcccctgccaccatgcctggctaatttttgtatttttagtagagacaggttttcaccatattggccaggctggtcttgaactcccgacctcaggtgatctgcctgcctcggcctcccaaagtgattcttcttaaggtctctagacagcttgtgaccggcaatgcctgtcagctagacaggtcaagtttccagtgcatccgtgcatttccagcatctgagtaccaaatacacctcaacgtaccctcaacaggcacacatccctgcacagtacagtaaaactaggatgggttcaaatctcaatgtaactgtgtatgttgagatttgaacccatcattagatgaacttgtagccaaaacaaacaaaaatgtcaatgaaagaacaaatataaataaaacgcagaaactcctgatggcttggtttgctgaactaacctgggttcttataaaaaatatgtgttctttacagaacttgatcagggctcttgatttttttataatcaaaaagcctgtttatacttgcatttttatttcattggttttgtgatgattttatattgagtattctcatatcaatcaatagatattgacctttgtaataagctgtaggtgttttcagaaactttttaacactattacattttcttcaggcattagaaagtcagattgtttttacaattgtggaaaattgtttgaaacttcatacattgattttggtttattgcaaggtaattatttgtgggtttcaaaccccagtatttaactactccttcatctgcaagcactgatgtgcttcccattattgaagtatagactaactttagaagacagagccaggagatctgaaacagtgctacactggggccatggttgctgtgggctttgcatagttgtatttgaggtgtgaagccctttatacaaaattttgtgtttttagatgctaccaatagctgcatgcattgtctgcattgtgggtaaagtgggactgtagtgctcatcaaagggagatacatagggctgtgacatagtttggatttgtgtccctccccgccaagtcttttaattgtaatcctcagtgttggaagaggggcctggtggaagatgattggattatgggagcagatttcccccttgctgttctcatgacagtgagtgagttctcatgagatctagttgtttaaaagtattagacctcctgctctctcttcctcctgctccagccatgtaagatgtgcctctttcctcttcatcatctgccatgattgtaagtttcctgaggcctccccagccatgcttcctgcacatacttcctgtacatcctgcagagctgtgagtcaatgaaaccccttttctttataaattagccagtctcagatatttctttatagcaatgcaaatccaatgccccaccttgatacatgggtactattacacttcaagatcagatttgggtggggacacagccaacccttatcatgtgactaagatttgcattttcttacctaaggaggcatgtcacattctctttcttccttggagctcttactccttgttactagggcacaattatattcatggaggtaaaccatatttatttatcttacacaggattcatgaatatctaatttttctgtatgaatatgaatgtcctgtaaaatggtcactaaagatccccattttcttgtattcatgccctgtgtaagtatgcttcactcaagtgtggactggacaaggtgacttggttctaaccattagaatacagaagggataatggaatgtcatttccttgattacagtataaaagaagcaagctgccaagttcgagaggcccacatagcttaaaattgagggcagcttctggacaacagccagctagtaactgagcccctcagtccgacagcccaaggggaactgagtaaactgccaatactatgaagtaaacttagaggcagacctttccccagtcaaaccttcagatgggacagcagccccctgagccaacttcatgggattgcaagaccatgaagcagaggacccagctaagtcatttcaaaataccttacacacaaaattgctaatcaaaaaatgtgtgttgttttaatccactaattttaggattatttattatacagtgaaagatattgaatacaatggatgttggacgttgaggaacgaatgtgactggtgaacttggggcccaaatgttgggaatgcacaggtgcatctgaaactttgctaatgctagttgacatgtgctgtagttcatgagatatctaaagcccttatgaaagtattggataggattcaggaagaatgcgaccaacggatttcttctactttttggtgttgtactgttgggagaggggactgactagagggagacttgggaatgatatcacagtaataaaatacatttagataggcaacattaagttaatgaagtatgtttagattctgggaaccaggctggttttcatttattctttggaatataatggggatgctgctataaatgggcagtcaccataatggtaaaatctttgagtgtttagaaaatcatgtaactcagaagcattagcatgagaagaggctattaaagccagtgcaaattgcaaaactatgctgtttcagaaaaaaaaaatcgtaaactagtacttggctctgaattgaatattaaataagacattgtaacaccctgtggatttggcaaaaccaagttcccatgcattttttagcttttacctgaatctaaaatttttcacctcacatgaataaagcccacccaaggttcaagtgaaaagtgacagatttaaagcacaagggattgtatcctggatctaaagatcaaagagtggtataaattagattttgtaactactgtcaacacaaaggcttcacatcttgagaaaaagagacaaggcattgagaggaagcaataatttttcacagaagctacaggaagtcactgtcatgctgagaatgtgttgctcagctctggagtgtgcctctagttctctgttttagaaatattgcacacatttcattaagtgtaaacacatctctattataaaactgtcaaggaggagataagataaaaatttatcataaaccacagtaaattgggagagacactctggttataaatagattcacttcaagatttgctttctaacagggtctgggaggaagagtggggaaaaactctaacaaattcctttccatgcttcttgaaaataaattacttttttccacattgatttattttttaaattgacataataaaattgtatatatttattgtgtataacatgatgttttgaagtatatatatacattgcggaatagttaaatctagctaattaaattcattacctcacataattatcattttttgtgggcataacacttaacacccactgtcttagcattttttgagaatataatacattgtcattaactacagtcattgtgctgtacaatacacctcaaacttattgctccgtaaatatgtatttgctgaccaacatcttcctaagccctcctttcccctagccaccccagcctctggaaacaaccattctactctctaattatgtatgatcaactttttaagattccacatataagtgagatcatgtggtatttgtctttctgtgactggcttatttcacttaatgtcttccagattcatccatgttgtcacaaatgggagaattttcttcctttttagggcagaatagtatttcattgcgtatatataacacattttcttttattttacgtcaggagttacatgtgcaggtttgttacataggtaacttgtatcatgggggtttgttgtaaagatttatcactcaggtgctaagcctactacctaataattattttttctgctcgtctctctcctcctacacttcaccctgaagtaggccctgggtctgttgttctcttctttgtgttcatgagttctcatcatttagctcccacttatgagtgaaaacatacatatataccacattttctttatccactcatcggttgatagacacttaggttgctttcatatcttggcctttgtgaatagagccgtaatgaacatgggaatgaagatatctcttaaaaaaggaattgcaaatggcattcatttatgaaccaaatagttgttaatactacccattactaatttttaaaaatgggtgttttgatgtctcctagcttctttacttatacttgcacatttggctttgggatattcatagggcaaaattcattctaacaaagaagaattttaaaatgtgtcaaccctttatctgaactctaaagaagtaatatttatcctaattgagaaaacattttggaacatgtacaaaaaacatgtttttgtaccttccctcaacctctcatttatgtaagttagatagatccctcacttcaagctgattatctggagcatatggtactgggaaaacagataagtgtaggcttatctttttgatggccatgtatccatcaaaatgtaactatactgccaatcattctttaggttttaggtaaaaacataaataaatcctgtccatttttatagaacctcagagtttactggatgtttttgtaatctagcaaggaggggcttggtaattaatatcatatttacattttatatcaattttcatttgttgtgtgcacaaatatgtttaggttaactgttctataaactgtgtatgatcctcatttcattcggtggttttattctgaattgtggtgggccattctgaattatgtttttagaaagtatcaatttgataaacatcttaaaatattattataaatagattagtaacttcaaggttgatgtaaatagatcactcaattttgactgaataaatgtggaatgaattaacactgctggaggtagaaagactcagttttgcatggtcttgcctttgatctagttctcaaatttcctcctggcacagaatatttatagtgagccttctggaattgccacttgataaccagcaacatgttgtaagatgttgttatagctacaacatctcccacttcttttcgataatttgcttcagcttaaacttggctctgtcttactgccattcaggaagtgtctgtttatgcattcaacctcgcttacctcacggttgaggggtgggctacctatcctctttgctctccattgcagagtagtatatcaccatctctaaaaacaaaaactactcatttgagacccatggcatttatttattctacccttgcccctcctcaaagctgccctcgaatgaccacctattcaccatccgtcattcatcaaagacattgacatttgtctcgtcaccttcctctctactctaaccttgctatcctcttgggtatcctcagtcctccaacgactgcatgaacaacccagtgaataccatggctttctggtttccagcccccactcttccagtttccttctcctccgtaccccttcaaccacccactcccacaagaacattttggaaatatatcatcaccaaaaaccatcccaccgacagaattaataattcaagcatctttccctctcaccatagccccctctactttcagattattaatctacccctgtagaccatctttgatcattttcacaatgtctggtgttttaatcttcaactttctcccaaactgttggcttttccctttcttccctttcactcttttttattttattttaatttattttaattattttaattttttaattttttattttttccctttcactcttaatagctcaaaatatataattcattatttccgtgatactgcctcaaatgccaaactctcttgcttctctgttttttcttttttttacccatatgataacacttaagataaactaagccattttctaactccatgccttcattcaagcagccaagagatacatgataaagtcacaccaatagcagattcactcccacacatttattttttaaattatttatttttattttttagagacagccttcttctgtcatctaggctggagtgcagtggtgctatcatagctcactgcaacctttgaaatcctggcctcaagtgatcctctcaccttggctcccccaaagtgctgggattatacgtgtgagtcactgtgccccaccagcctattcctgcaaattttcactgctccatatttagatctaatcatccactctgatattttccacaaatgatatctctctttaaaacaactgttgtgaactctatcacttgcataaatagggaatacaatggctataccgtgtaaaggatattgataccataaacactcaggtgcccaccaatcactataagaaatagaaaattacgtgacacagtggcttttcaaatatttcctgctctccttcattttctgacttccttatcacacccacacacagtagatatcatcagagtgcagctcccattttccaggttccaaatctacagacctggcaccataggcatctactcatcctccttcctccagtttctataaacatgttcatttttaaggtcattttataagcaatcccttagagaactctcttagattttacacacgctcatattttttctttttaaaaataccattccaggccaggcacggtggctcatgcctataatcctaggactttgggaggccgaggtgggcggatctcttgaggtcaggggttcaagatcagtctggccaacatggtgaaaccctgtctctactaaaaatacaaaaattaaccgggtgtggtggcgcatgtctgtagtcccagctacctgggaggctgaggcaggagaatggcttgaacccaggagacggagtttacagtgagccaggatcgtgccactgcactccagcctgggcgacagagcaagactgtctcaaaaaaaaaaaaaaaaaaaattccttgaaccaacatgcccttcaggtaccaatccatttcttgctttctttccgcagtccaatttctcaagcgttgccagtactcgctatcttagtttttcccacccactactcattacttaacccacactggtctggcttctgtacccataactcctcaaacagctcttacgcattcaacctgtggcctccaagtggttttgtctggtaaaacatttttaaaaatcatcctttgtgtccttggagtagaaaggaagacttcagtatgtgttttgtccgtcattttcatggaagttttttctgcatctttttttttttttttttgctgcattctataatatattttgggtaaggggccttcctgtattaggtgggtgactctacagatctttggactatataactccactgtaacttgtgtgttctttcttacatcatgaggtctcagcttaagggcaaccactctacactctgtgcaggggtcttctgggctcctgaataccctcactttgctgcctgccaattactccctggtgttcctgccaccctctgctgccgtgtctttcaggaagtctattgcgtgaggctgcaactggctgtgaaatctagtgaataatatcctgagacagctgagcccattaaataactcttaaaaatgtactccaggtttgttctgatagttagctggcattatcccccggcccatgtattagggcactcacccacactaagttctgatcttacattttctcccctcctctccactccactctgcttagtgagaaattcttgacgagatcttgagccatcagctcagtccaagaaaacttcaatttgctagcctgaatctctgtttctagcccttaattttttacttgaagccattctaagattttaatagggtaacatgtttccttaactcatgggggatgaggggggcctctccgcatgtctaaattaccgagagtgataaacatttcagtccctgtgatgccatctgctttctgctctccagaagttgtttctaatttgttttttggtactctcattttgtttcccgacaatgctccagaagttttctttgtttttatgtttttggatttctgtattatggagagggatggggtgctaaaaagtttctcactttgccatcttaaaactgaaaagctaccttctctgatgggttctgtgagttgtataaatgtatcatttgaatccagtggtttgagaaatatgatctcatccaagcagcccaaactcaaagcctggtccactttctgcccatacgacaggggcgagtgactgcaacacacaccccagctgtctcacatgtagcatggaaattgatcattgttcagagtaaatgaagtcctattttcaaagtcacttagcacactgcctgagacattgtgggtgcaggctggaaggaggttttactggacaatttgaatacagtcatgcagtggggaagttcacccatatcttttctcctatgctgctcagaatgaagaggttggtgtctccacttcctagagtgttttgtgggtcaaggtttgctcctatggagggcttccagtcctgccatttggtccagtccatgtgtctctaaacctggggaatctttatcaggtcaaagctagaattttccttttttttttttttttcctggtaccaggtagctgtcagcagcacaggtttacatgttcctagtaccttttgttatttggtactctcatcttgttttccagcagtgcttcagaggttttccctgtttttctatgtttgcatttctgtattatgaaaaaggatagaatgctaaaaaaatttcaatttttctcaatttctagttccaatagaaataaatttacttattcccccaaatttcccatgccaagagatttaaaattgagtacctttcttaaaaagagaaaaatgtctaggatggatggagtatactggaaggccgaggtggatcagctaggcctggacctcacagatggtcccatctgagccacagaaactatgattgggacaggtgtttttttcccaaggaaaatcagaagggtgaatgaatgcttggcaggaaaaaacaacaggcatccattacatgcactatcttccttttctgtttgtggtggccatctgaagtcagggggagcactagggaccctcattagcgtctttgaatgccctccttacaagaacgtgatgccagtccatgccacgtgaaagctgaggtcaaacgttgtggacagatgtcctgtgtgcactgtcctggtgcagctgccaaaatcctttgatttatcccaagccaactgtctagttattttccttactggccattcgctactcactggggggtttcccagggatgttccatctattttcttctatttactttctgtgttaaatctcttattttcctccatctgacataacttacacaacatcattactgacttattaatgccacttttctgattcttagtgctaatgactttcttctttttatattttttggtcaattctatggattctgagagaaagcaaatttaaatatgcaaaattgaattgccatgttatatttaaactcacacttaaaacctgtaatcatcttcactttgtgttcagtatttcttcatactctgttttgccattttatgccatatgctctgatcagcacacatatactcagattgctaagtaccagtcatgactattctaatttatttgaaccaaggggcattgagaaaagaccatgaatgatgctcccaaaccatcacgatccttgtaagaatccttaaggcaataactttcaatgtgaagttgattctaacttgcctagttgttcaataaatattaaatggtaatgattccaaagaaaccatgttgttggtaatctcatcctatttaatattgtatctctgcaatcatgtatgagtaaattcttcaaaaatcaaatttagtattttcataatattgctgaaattataaaccactgtgttattgtgtctttccacttagtttcatttttcaacaatagcacactaaaatgaaatatcattctgaaataactaaaaaaaggtagcaataattattgtttgttcctttggaaaaaatatttttagaaggtgagataacttaggtttgaagttttcctccgaatgtttacaagagggaacatggggtccgaactgttgtagacaatagacaaataggtttctcggcggccagaatctgattacggtgaaaacagaaccttactgtgggaactggagagagcagtgcctcttgaacttaagcaagtgagtgtattttagcccaagataaacaaagtcattgcagggttttgacctgaaaatgaggttagagataatactataatatttcagttgtacaaatcaagacataaacatgttccatcctctgcagttgcatgaagcaatatatgtgcttgttcaaacaacagaccaacctgcctgggttggaatcccggctctgcttttacaaactgtgtataatagataacattgatacctgccttgatctccttttctgggtcagtgcacgcatctccagctgcaatgaattttgtttgctcttggctcttagccgctctcttccaataattgccttgggccaaatcggagccatctcatcatcccccatgatggcaagcgaccattgactaagtgacatgcagggtacaaagaccagcacacgggccttaagtgacaccaactctgtgtcgcaatccactctccagagctccaggctgaatctgttctccatcctagaccattccttgcttagttttttcctccttatctgccttgcttcctttactctccttctctgagagtgttccgtcagtaaatcactttcataagaatccttacattaggagctgcttccagggcacccaaactaagccagttggttctgcaattgttcctaggaagtagacacaggcaggatgggattccagaggttaatcacttgtctcttcaaaggcaagtaggagcctattactggtggcagctggagtattgatagttactggcatgctctaggaggttacaactttatctatgttgagatagcacaggggaacagtaactatcagggctatgaaactgagtggccattgataaggactaataatgcattgaggagagaaacaaaaaggctcagttctattaaaaataaattaaaaacaaagtgtgaaagtcagagaatcttcttggtagcatttaaagggatatttgtcttttgcagccagaggacagcaatactaaaaacaagactcaggagttaactttaaaaatgaaagaacatcaaagaaggctgaattcttagcccaaacaagtcttttatgttgaagttcgggtcctggtatagaagaagtgggactctgagacatggaatggggacatatatgtagacactgagaagtgtcccactctctttgttgaaaggtggaagtggccccttctacttgttcaaagactatgcagaggccttaaatgaatcaggtgcactataagaaaatgcttgccttccccaggatttgcaaccacttggacactagactcattaatagggcaagagttcagcataaccagaataactctactggagatctggtcctgctgaagagagggatcatatatcaaaggaaatgcaggacgtgattcatgtgtgcaagtaggagagtgtggaagtgaatcatccgcatgccggatcaaggacagtcaaataaaagctggagaaagaagagattatcaatatgagatcccttttctgtgacacaagattaaacaccatggcaatggctctgagtgacaggtttagtaagctgctaggaaggttcctggaagcatgaaaaaagtgatgatgcatattaaacaaagtgaagatgctataacttccatggaagtctatagagaaaatatttcaaggacccaggggatttggcatgccagaatgtatttactgtataaaactgggaaacccactaatgtgtacattccttgggagggcttagaggacactttatcaaagcagtaggaatgagctggtgaggaaggtgtcagtattgttgagaagcccagtggtgctgtcctttatgggcagggttgacagtaggagatgctgtaattgtgcctcccaggagcaatgtggatgataggattttagaatagcagaggccaacagacagcacttaaccaatggaaattagaagggcataattagcataatgcaaagcaacttgggatgacagtcaggggaacctgatccacagggatttacggtgatggctaatagaacatgatgtccataagaatgggaaagatgggaactcagtgacaatattattaatatacataccctaagaaatcaagaacagacaagcagaaaacaagaagctgacccaacaggaagtctcctgatcttgcccagtttccagaccgaagtcatttctcagttacagcatctacagacagagagtccagagccccatgaagaaagactctaccacagtgtgtacggtaattctccctccgaccttccttaaagggacctccagaaattactcaggtaaccacatattaaggaaaggggaagacccagatcttttgagggcttttcaacacagagcctgatttgatgctggtacttggaaaccccaagagccatgatgccccctgctcctgttagagtaggtgtatgtgtgaggatcaggtaataactgaagttctgactcaggtctgtcttaaactgggtccactggggccctgtaggtacctggaggtcatttccctgatttccaaatgtgtaactgcaatgacatatgagttgcagccatattcctaagtgaggaatatactgcttccagatcttgaagacaattaccaagcactgggctttctttttagtaaataaagatttaaacatgatgtttaaaaatactgagaagaccaagtcccagtaaaatccagatctctaggtccctgaaaaaatatggtgatccttgagttttacagggtttatctcccaccctttggggtgcatatttcttaccaaagcctccaatctatttgctacctcttgctcgtgtgtatggatcaccatgatggtgctgatttggtggattaatgtgatgttctgtggaatgtccaactggtctcattcccttgtactatgggatgacagagggtagggcaattaatgcagccctggggacagactttaagtgaacgtaatgtgcctctgatccttcttccagctagaaatgaaagagaacgcaggtttaccagcacactcctggacaggacacttggtcagcaccaatacttgcaatccctccctcattccaacctctaaccactgcctcctatcctgataatatcctgctttctattaattacttgacctacaatctatttatgtgactaacgtttcacgatttctctccatttgcatgtcatcacttcattccttgcccagcttaaatggtttcagcattatatcagtccttgcatatacccttgatatccttgtctttcttctaactctgccttctgcacacctgctttatgcaccagaacatgactctagagaatcatggaacatgttgaaattctcactttaaattcataatcactaatcccaagctggaccttagtgctgcccagaaatcctaccaccttcaattgtattaatattttcactctccttatcctcttcctccaaatttatagcactttcccccttcttattctccttttttcacttcactgagaaaaaaaaaagctagcagaagagaattctgtcatctcccatccacacatctactcacttactggatctggatcctataccagattccatcccctttcattaccgcaagatgttatgtaagcctcccttctcttctgcttcatcattccagtcttctttcttctagaccattctttttgttgttgttgttgttgttgttgtttttgttgttgtttttttttgttgagacggggtctcactctgttgcccaggctggagtacagtggtgtgatctcggctcactgcaacctctgcctcccaggttcaagtgattctcctgcctcagcctcctatctgggattataggcgtgtgccaccatgcctggctaatttttgtatttttagtagagacggggtttcaccatgttggtcaactcctgacctcatgatctgcctgcctcagcctcccaaagtgctgggattacaggtgttagccaccatgccaggctagaccattcttattatcatacagtcaaacatgctgtaatttctctcactttaaataaaactctttcttgaacatgcaaatcccttccagcaccaatgccttttctctgtgcccctttacagaaaagaatcattgaaatagctgtctgtattgttttcctatcttctgttcccatgctcttttgatctcacttccaggattccgcactgcaatccatcaacattgctcttgttaaggttactgatgacctttctattattgctcaatccattcatccattttcagcggatcagttaatccattttcatcacctcacttgctctatcactagcatttgacataacgaaacactgactctttacttttgtttccaggacagggaggttcaactattattcctttcatactcattacattttggaaaactatatgccctctcacacattcattttgctgtcatttaattggtcatagtattttatttttttttttttgagacggagtcttgctctgttgccaggctggagtgcagtggtgtgatctcggctcactgcaatctctgactccctggttcaagtgattctcttgccttggcctcctgagtagctgggattacaagcatgtgccaccatgcccagctaatttttgtatttttagtagagacggggtttcaccatgttggccagaatggtctcgatgtcctgacctcatgatcctcccaccttggcctcccaaagtgctgggattaccagcatgagccactgtgcccgacgggttatagtattttttaaaacacttctaaatttgaaattatttcgcactcaaagaagagtggccaagatagtactgagaatactgatgaacattttccccagcttcccctcacgtgaacatattatataaccatcgtccatttgtcaaaactaaaaaattcacattggtacaaaactgcactttattctgatttcaccagtttttttcactgatgtccttttttctgtcccaggatttaatctaggacctacaattttgcatttagtcatcatgcctccttagtctcttccaatgtgtgacagtttctcagtctccttgtttttcatgactttgacacttttgaagaatgctactcaggtattttataagatacccctcaatttgggttaatccaaaattttcttatgattgggctggtgttatggagtttggggaaaagttctaccatagaggaaaatagtgtttctgattccagcatacacaatgtgtgtaaagagtgtatacaatgttagcatgacttattactggtgatattaaccctggtcacttggttaaggcgtttctgccagatttctccactataaaggcagcactttctcctgttcacactctattcattaggagcaagttattaaatcctaccctcacccaggaagaaggaattagacttcctctcttgaagggaggagtctcaaggaatttaatccactgtagttaattcagactatggggagtttcttggatgttatacaaatatactgtttcttcttaagtctttggccactaatttcagcattcatcagtagatcacacctgcaataatcattattctgctgccttcacgacctttcatacatttttaagttgacatcgaaaattttcttcttaagtttaaatctttgtatattcgtatactacctgaatttcagcactgtgtgtgtgtgtgtgtgtgtgtttgtgcgtgtgtgtttccctcagaatcttagagttgcatatttatacatatctaatgtatggaaaaatatctgccatataatctaactggcaaaaccagtcttcacagtaaaaatcaaccatgcagggaagcatattttttctgtcagaaaaaaaaactggcttcattttaattaagataaacattttaatacacatctctgtcacaaacttctcacctccaaattctaatgcatggaaagacagacagatgtatagccatagcacaaaaccttctcatgaattcgttccctggatatactaaggtgctgtctttttcccttttactctttttttttttttttttttggcattcatcacaatgcctttaattttacttattttttttaaattatcttttgaagtttttgtgagtacatagtaggtatatatatttatggggtatatagtttgtctctgtgtccccacccaaatctcatcttgtatctcccataactcctacgtgttgtgagagggatccgatgggagatgattgaatcacgggggcggggctttcctgtgctggtctcatgatggtgaatgggtctcacgagatctgatggttttaaaaacgggagtttctctgcacaagctctctttgccagctgccatccacataagatgtgacttgctcctccttggcttcctccatgattgtgaggcctccccatgtggaactgtaagtccaataaacctgtttcttttgtaaattgcccagtctcgggtatgtctttatcagcagcataaaaacgaactaatacagggtacatgagatattttgatacaggcatgcaatgtgaaataagcacatcatggagaatggggtatctatcccctcatgcatttatcctttgtgttacaaacaatccagttacattctttattttaaaatatgcaattcagttatcattgactatagtcgccctattatgctatcaaagagtaggatttattcttttgttttattatttttgtacccattaactatccccatctccccctatatccctccactactcttcccaggctggtaacaaccttttttttttttggacgaagtctcgctttgctgccaggctagagtgcagaggcgcaatcttggctaactgcaatctccgcctcccgggttcacgccattctcctgcctcagcctcctgagtagctgggactacaggcgcctgccaccacgcccggctaattttctgtattttttagtagagacggggtttcaccgtgttagccaggatggtctcgatctcctgatctcgtgatccgcccgcctcggcctcccaaagtgccgggattacaggcgtgagccactgggcccggccaatttttgtatttttagtagagacggggttttaccatattggccaggatggtctcgagttcttgacctcgtgatctgcccgcctcggcctcccaacgtcctgggattacaggcctgagcaaccccgctcagcctgtaaccacctttctaccctctatgtccatgagttcaattgtttttatttttagatcccacaagtaagtgagaacatgcaatgtttatgtttttgtgcctggctcatttcacttaacataatgatctccagttccatctatgttgttacatatgactggatctcattctttctttctttctttttttttttaatggcggaatagaactccattgtgtatatgtaccacattttctttatccattcctctgttcacagacatttaagttgcttccaaatcttagctattgtaaacagtgctgcaacaaataaggtgtgcagatgtctcttcaatatactgatttcctttgttttcggtatatacccagcagtaggattgctgggttatatggtagctcaattcttagttttttgaggaacctcaaaactgttctccatagttgtactaatttacatttctaccaaaaatgtacaaagcttgtcttttggatataagtcattttaactggaatgagatgatagctcatcgtagctctggtttgcatttctctgatgatcagtgatgttgagcatcttttcatatgcctgtttgccatttgtatgtcttctttcaagaaatgtctatccaaatcttttgcccattttttggatgggattattagattttttcctatagagttgtttgagctccttatatattctggctattaatatcttgtcggaggggtagtttgcaaatattttctcccattctgtgggctctctttcactttgttgattgtttgctttgctgtgcagaagctttttaacttgatatgatcccatttgtccatgtttgctttggttgcctgtgcttgtggggtgttgccaagaaatctttgcccagccaatgtcctagagaatttccccaagattttcttgtagtagttttatagtttgcggttctagacttaagtctttaatccattttgatttgatttttgtatatggtgagagatgggggtctggtctcattgctttgcatacagatatccagttttcccagtaccatttattgaagagacagtcttttccccagtgtacattcttggcaacttcgtgggaaatgagttcactgtaggtgtgtggatttgtttctgggttctctattcagttccattgttacgtgtctgtttttatgccagtcccctgctggtttggttattatagctctgtagtataatttgaagtcaggtaatgagattcctccagttttgttctttttacttagggatagctttgggtatttccttttaccctttcttacaaagtgtttgtttttagaaaacacacactcaggaatgatcaaaagcgcttgcttttttttttttttttaattatttttcggagtaatgttccacagtaagattcagaatcagtaccaggaatgcctttcttttgtaaaccagaaaaaatgcaaaaacggaagtggaaaagaagaactggaagtccacaaatgccttctcaagcatctttttaaggaaagtggtcaaaaggagtttgtgtatctggaagttgagttctttaaagcttcttatgctcacatatactctggaaaatcttgtgaccccagggtatgtatggcaatgcactatatcaataacgtgctctaaattattggagatctaaacaatcctcttatttgagcaaaaatagatgtatttgcttgtctcccaagatatttgacaaaagtcatcaagcattctattatcaaaaattattttaattgatgtatcacctggctattcacctagtttctgttataatttggctggaagagaacgtggagagaggtgtgataagatccttatggcaaggtaattgaaaagtaaagagcactgaaagtctttgcagataacagcattcttggggaggagcattcctgtaccgttgagattttggttggttcttttcaaatcctcagttctgcaaaaaaacataaaagttacttctatgtgagcccccaaaggatatcaccaagatatctttccatttaaaaaaagtaagatacaaatttaattttaaattttcttttaccaaaagactatgtgatccaacgttctgcagtattgggttatcattataattattattcacaatttctcaaaaacatgcatatcatataaatgttaatatgtaaatattaaacattaaaattaaattttattggaaatgtgtatcttaatgaggtgaattgaagtttatttttcttttagttcacttatttatgaatgaatattgctaattgctggaataagataactcttagaacaatatctgttcctttttttcatttatatatacctaaatatcgagaaaactaacttacacaaataagtaaataggaatagaatgttattgtactgttactaaattatttatgtttctcccaagatatttggcaaaagtcacaaagcattctattactaaaaattcttttaactgatgcatcagctggcaattcaactagtttatcttataatttggctgaaagagaaaattagaaaccatttgactcgatggttttctaattgttagcatcattcaccttctcaacagggacactgtcattttagtaatctcactgtgtgtcattccagatgtttttatacccagagccatgctaatggtaagattcataagggggtgaggagtgactgcagtttattaggtgggagaagagttgttacaaaagaagcattgggaagcaagaatctgcacgttcatcattgaaacatcctcaaatctagtgattttagcaaagcatgcataggaaattgagggcttaggagtctgtttccttatgattgtttacctcttggatacgtttgatatagcctgctctaataactgcctgttgagggtgcctgactctcccagttttcctccttccctccctgatcatcccttttaaatttcttttgcaggcttttcctcacccctgaatgctccaaccagtcctcagaaagctacattctttctcctggggatctcatccatttccatggcttaactaccaccaataggttgaactaccaccaataggttgacagcacccagagattttttttttctatagtgggatcttttggtgagcactcaattcatataacaaactctctccataacgtccctagtgagatgtctagcagacatcttaaacttaacttgtcctaaaccaaacttctaacctgctccctgatatggtttggctccatcctctcccaactctcatcttgaattgtagcccccataattcccatgtgttttggaaggacccagtgagggataattgaatcatgggggcgattttccccatactgttcttgtgatagtgaatcagtctcatgagatcttatgtttttataaggggtttctgcttttgcttggttctcattctcccttgtctgccaccgtgtaagacgtgcctttggccttccgccatgattttgaggcttcctctgccacacagaactgtgagtcccttaacttctttttatttataaatcacccagtctcaggtatgtctttatcagcagcgtgaaaacggactgttacattccccctccctaattttcttcttccgtagtcttccccatgaaagttaatttggagtcattctttagctaccagccaatgctgttggctctaccttcaatttccaaaatttggtctccaatactatctcttatgggttgttcctgataccgcagcctaatgaattctttaaaaacacaccagagaagagaagaaccctccagcaccgattttttttctctgtctctcaaaaagtaaaagacaaactccttaaaatttccacaatcccatacgtggttggtccctacttttctaaagtcattctggactgttctgctcactcactccattccaactccactggcctgctcaggcacgtcaggtgggctcctccctccagaccttgccattggccattccttcaaccgggattcttattatccaacgtatttatatggcttattccatccccatcctcttcttcaggtctttgctcaaatggtcaactgtgaggtcttctccaactcccaattgagtattgtatcccatccctcctctacactcctaattcctcattcttgtatcattttctctatagcacttttcattcatgatgttctgcatgctttacttgtttattattatattacattttctgttttccttcactgtgtctcctatgaggagagctatttttgtctgctgtatctctagggccaagaacaatgactgggctcatagtaaaaattcaataaatatgtgttgagtgataagtaaatgagacaactatgccactaaattgtaaaatgtaataatgttcctggagggtttttctccagggttttgtattctgctgtctcagcatagattctgcattttcttctgcagttaagacatttcagagatttgcaactcattaattctcagaaaagaataaaagatttggaatattttctttttaattattcctgatgaggtttgagagatgagccatcctgcaagtgcagtcagcacattcttttgggacatccactaagctatgtatataagtattttttttttcttgctttccttaaccctgttttgtcccagatcaaaaatactgaccctgagacttgcttcccctattgggtcagctgccctgcttcctcatctcgtttgctgatgcagactccagtctgctgctctagtctgtgttccaggaagagttggctcctctccttgaggaattgggggcctggatgaggagtaaccctgtgtttgcagccagatgtctggtcacatcttcccgctaggtcagcatggtggggcatgcaaagtccaagctgatgtgcttgactccaaagcagaaaacattgtgactttatagtccctatgagttatctagattaactgagaaccctaattcttgccttggtttcaaggcccctcaaggtcctctatttggagaaactaaattactcttaatggggctttgcataggaagttgttttctgtccactgaaaaataggacacggtccccttttccactcctctctccacgcacactctcacacacaccccacactcaggaaaggcatggtgtggtatttaaacatccagagtgagaccatcagggtgtgaaactggttctatcatttacaaactgtaaggacaagagcaagtagattaatctctctgtgcatgagttttctcatttgaaaaatgagaacattctacttatctggtagaattgtaataaattaaataatacattataagcacttggaactattcctgacagtaatgctaaatcaatgttagttattatttttatgatcccaatttgaattgtattataggaaattacacattacccatatctcctgtagtcaaggcaactaggccaccaaaccttccaatggtgaaagttcccagttggcagacgggatcatcctggtgctgatttaagtctagcattcattcaccaccttggcagtggtatggttaaaagtcagaattcttggcttccagtctttttttctgccactacccagctctgtgaactcaggcaagttacctaacctcctatgccttgtcttcctgatctgtaaaatggaggtaataatagtgactcacaaggttgtcgagaatattaaatgaaataatatatggaaagggccatatcatcaacactgcaaacctaacataaggagcccattgttttccatttccaggttcttctggttccatttgctgcccttttcttagtgtatctggactgcttggatccttccttatgaccttttcacttcttggctctctcagatgactggggtcaagaggatacagaatagcacgcaaggagtcctgggttctccataaaaccaacagttctaagtcctggtttgctggaagctggagagatattaatgctaaactctgcctacttctcatgcacctggcaactgctttcagtcatggaatccaggagaatttctagctctatgtgcccagctgaggtggaagagaatggtagcaactggggaagtggccaaagaaggagactgtactcaagcccacatggtcttcctacactttgttccaccattgagccaggcacttccatcatataaaagaggccccttttcactgaaccattggccctgctctattcttcaaactgtttgtcttttcttctctagttttccagattctgaactttctactctttcttctattttattctttggacttagatgtccgtttctcttttcctaatgacaagccataatttagaattaagcatatgtacatgtgccacattttctaacctgcacgctgtgcacatgtaccctagaacttaaagtatgatcaaaaataataaataaataaataaatgaatttaaaaaaagaattaaggatatgtaaacttaatatgtataaaacaaggataactttatctgctcttataaattttgtagcacttatcagcaaaactatctgtgtctgaggctttttgagtgtaaaggatttaattattattactgttttttgtgtgggtcaattttggcatttcggataatttttctagaggtatatttatctaatttatccttccttccttccttccttcctccctccctccctccatctctctctctctctctttctttctttcctttctagaggtatatttatctaatttccttccttccttccttccttccttccttccttccttccttccttccttccttccttctttctttcctttctttctacctggtcttgctctgtcacccatgctggagtgtagtggtgcaatcttggctcactgcaacctccacctcccaggttcaagcgatcttcccacctcagcctcccaagtagctgggactacaggtgcacgccatcatgcccagctaatttttttgtattttttgtagagatgggggtcttactgtgttggccaggctggtctgaaactcatgggctcaagtgatctacccgccttggcctcccaaagtactgggattacaagtgtgagccactgagcctgacctactctagggtttcttctcttttgtttccattgttgatgagcattaactcaatatgactcatgcatatatttattttgtactatcaattaaggttagaatttctatgttttgtcctaaaatggttaaattcctggaccgactcttctacctctgtctgttctctcctcctgctccctccttgttgatatcttgagtttagctctggaatgttataaataaatttattggtgtgctgggatggggtgttaccggttacttaaacaaaaataaactgtactgagttatccacttactctcacttcctgtatcattttgcttcctctggcattatttttctctagtggtttaatgcttcctccaagaatgttccaacaaagtatttgtttggtaaactttgaaaggtcttggatgctaagaatatttttatttcagtgtcattcaaatgatagtttattggtataaaattctagcttcagagtttctttttttcttccacacaaccacagtattacctattatcatctcatatctaataatcctgttgaaagacctttaataatatggtcttcgtactttcctggttctgcttgtcttctaacaatgtgtttcagttttctttatgtatctgatgatctgacgtttcgtgacagggtgattaaatgtgatttcatttttcatatctctcctgcttagtgctttatgcactttaattttgaatcttccatctttagttctagaaatgtcagttaatatgtcttcaaatattccctcccttccttttattttgtcctgcctaagagggcctattctattatttggacactcctcttttaatcttccaagcctctcaaatttttaaaaatttattcttatctgtttattattttctggggctttgtgggtgagttccctgattggactaacgggcttcccagttcgtttctcagcagaacccgttcagtcatccagcccctgtgtggggttctttaactattcaatcttttattacatcaactctctaattggctctttttctattttatatttctaatatgtcttattttctctttgcctattataatttttattgtttaatctattcttatttctctgggatgactgtacagttgtcattcatttctaaatcttgcactctgcagaatatttctacttttccctctgatctcacagtgtcatgacttgtagggagtatctgggggggttgggaggaggggaaaagctcaggccctagcctatgctctttgcagaggtatgggagggtagagggtagagaaggctctgggactggcctgcccatctcttcctaaatcaggctgcagtgcagccttgatgtttctctgccactgcctattccaggggccctgcagtttttactgtcccatgtattttgcaggagagagaaagcagtatacctggaacattccttgcagtctaacatgagctttcctttctaacctgtcctctttccatagctgtcttcccattacacatggctgtgtgctgcttgagtgtgcattcctcttacctcctccaaaaccaaccccctagccaccttctgctgcttcaagagtttctcaaaggtgtgtttctttttttttctttctattttggtgtatgcatcagtactgggattattgaaatgcatgtcaaatctgtaacatctctaggtttggctttaagagaggaagacaggccctgatgccaagctgccatcttatctgacacttgcaattctgctttagttctgtatcttacgacggagctcgtggctgggaagatgggatccaggaatgggtgtggagtgtgccccagacgaccccagaatgttcgaggggcaggtctcatattttctattttgatgtctcagaaactgccatgagctgctagaggcttctgttctcttttctctaattttcttcattgtcaactgtgaccctgttgatttctatggatatctacattgtcctatccagagtgactctagaactacccatgtgtgacaaatacatcacataaacagtaggagtctcttctgggtgtgcataggtcctcttttgacaccaactttctctttagcttctcaattaagagcatcaaatgtatggcattcaggtcacgatcactctaaaacttgtgttcattgaacgccatcagtacttaacctttgatccttgctagatttttctatatcatgaaagataagctaatgaatgctaatgaagctaatgaatgaattacttaatataggaatgaataagtgcattaataaaatgctatttgctgtagtattgcttcccagaggattatatcattttatgaattgttggttatagccttaaaacctaaggaaaatttcactctcatcctggaacatgctccttcaagatcgtccataagttgcctgtggagcatctgcaaccttttcttgattttaaaatgtttagttcatttaatcatgaattcagtattcagcattttctcagtgaagatataatgatggcaactctatgtttttgttcactccattctctttatttgggtccccctctacttctcagagttcatccagactcccccattttctgaggttggcacataatccccttggggtgagatgttcagtaacacaggggactgtcgagtccccaagccgctctgtgttcccaggagccctccgtgtgccagggcaggagtggagagctggccacgtcctcttctctgttattctttgctttaagcacacaaaaacagttctgcttcgtctatttcttgctgggagttcagagccatatattcccatttaacatctctcagcctccttgtaattcagataaatccaagtgagagtcatcatgctatactccattcatccatttattcattccagaaaccacttactgaaccttctaggtgttagccattgggtcagctctataggatacaatgatgatacagtagatagtgtcaaaaaaaaaaaaaaagacaaagacaagagagagcgatatagagagcagatgagggctgcccagccttggaaggggggagtttgtcctggacagagttctgtgtatctatggtgaggaggccagacctggagcggcctttccacagggtttatttagatgatagatgggtatgagtgacaggattgaaatgaaaccccaaggaacacacgtggcactccaaaatatcaacagtactataaatatatgtatgtgtgtgtgttaactagaattaaagcattaaaattaattaaaattaaaacttctaatgaactatttcaaaaattctaaaggaaggagtgtggtaataatagccaccaaggtatctacaagtatcaaatgctgtgtttatataaatgagagagggcatgagtattgacaagaaatgcattgataataattgtccattgagagctaggaattgaaaaaataacgcaaaactttcttgagaatctcaaaaaagcaataactcctgacgaattgttgaggtgacatttttttaaaaagatagttttgtgtagctggggacctgtaagtctcagtgaaatatacaagacaatcatgataacactaaggaaaacaggagttcagagcccttcttccctctctccttccttcctttcttttgtacgtgatagaaatagtgaattggagaattcaatccacgctttgggaagtactttttataaatgtgttaattaaatagtgggtaaaggcacgtatagaactaagaaaacattgttgcgtggacttttaacactctcgccacgctggtcatgttcagcactggccacgctctgaccggtacccacatggtatctttgttgctccctttcctaatcagaatcccattacattgctgaatatatttgttggacaaatgaagtccatcttttaattgtatcactcttatgaaaagcagcctggttctagaacaacattctaaagataactaacataataattatggcaacaatatagtcgaatgagaattgatcctgtataaggtcattttcagtgcttctttttatcgattttttgtaggccttctcttgctgtatctctcctgagtccctcattcttcaagagctatgactgtgttgtctgctcactctagtgtctcctccaaacaatttacaacattgtcctgagacacaaaaacgacaagccctgtcgaggacctcagggttgctgtttatgaagcagcttcagcagccctgggcctttctctcttgcttgcttcctcacatctcatcaagactcacctgtgggccaggcgtggtggctcacgcctgttatcccagcactctgggaggccgaggcaggtggatcatgaggtcaggagattgagaccatcctggctaacatggtgaaacctcatctctactaaaaatacaaaaaattatctgggcatggtggcacatgcctgtagtcccagctactcgggaggctgaggcaggagaatcacttgaacctgggaggtggaggttgcagtgagtcgagattgcaccaccatactccagcctgggtgatacagcaagactccatcaaaaaccaaccaaacaaacaaactcacctgctatctgtctatgtcttgatgggcaagcaaaatgactaaagacgatctcacaaattcgtccatagtggggagatagtgattgcatctgtcacacttctttcacaatcaaagtatactttacttttaaataaagtccttctatgctttcagtgagaaggggtggggattttaagcaattccgaagttcactgggggcactcagatcccaccccttaggctgccatatgctcactggaaggatcacattgaggaccctgaagagcctgaagaggaattgcataccttctattattgctgttcgctgtggattgaagtgcgtctctccaaaatccatatgttgaagcactaacccccgatgtgactgtatttggagatcagccctttaagatggtaagtaagtttaaataagatcacaagagtggagccttaatccaaaaggactggtgtctttttttttttttttttggtaggttttgccatgttgcccaggctggtctcaaactcctggccccaagggatccatccaccttgtgtaagactggagctgacatccatccatcagtcttgtgtaagactggagctgacattcacaccgtaggctgggcctcccagttatgactgctttgctgtctcacttactgcatgttatcccatccttctggatgtgtggcaatcctcgccacgtggcaagggcacagctggctaaactggcagctatgctttggagctcatgacagatgtctatcgagagtaaagatgaggagatttattagaaaactatcaagattttggagtgtgttggtcacttttggaagccttgaaaggtcttgcctgactctccctccccagggtcagaagcagagccctagagaaaagccagtgagcctaaggggggcgggtgttaatggtagaaaccctcacatctgtgccaggctcaggttcagagaccaacacacaaaatgctataggcttcttataccttccctagaaattaaagccaaaatgtctagcaacccaatcgggtttcaaggaagctgaagaaccttgtattagtatgttctcacactgctaataaagacatacctgagactgggtaatttataaaggaaagaggtttgatggactcacagttccacatggctggggaggcctcacagtcatggcggaaggtgaaaggcatgccttacatggtggcagcaggcaaagagagaatgagagccaagtacaaagggaaagcccttataaaaccatcagatctcgtgagacctattcactaacacgagaacagtatgagggaaaccacccccatgatttaattatctcccaccaggtccctctcacaatacatgggaattaaggaagctacaattcaagatgagatttggatggggacacagccaaaccatatcaaacatttactaggcctgagaaaaagtggcttatatttgctgactccctcaggtgggtcctgatcacgcaaggtaccaacaacagagaatgggctaccaagcctgagcaagcttcaaaagagaaaaacctcctgagtgctgttctcacacatgaccatgggaggaatatgtaaggcacagacttctggggctgctagatgggttaaccaggatgctcgtccgcatgcctggatcggggacctcccaactctattcctgtctttgacatcagatcaatgtgggtagaaattaacaagtctccttgcaaaataaaatatatatatatttgaaattaaaacattaaatcataaatgagtgtaatttattgaaagaatagcacaatacaagggaatctattaatacgatttgaaatattaaaaaaataatcaatcatacaatcctctctttggtcccttaaataatgcatctgaagaaattcaatatccattcataattaaagcacttttctaggaatttaaatataggaggaatatttcttttttattttatttatttattatttttttgagatagagtcccgctctgtcacccaggctgtagtcccgctctgtcacccaggctgtagtgcagtggtgccatctcagctcactgcaacgtccacctcctgggttcatgcgattctcatatctcagcctcccaagtagctgggattacacacatgcaccaccatgctgggctaatttttagtctgtatttttagtagagatggagtctcaccatgttgcccaggctggtctcaaatcccagagctcaggcgatccacccacctcggcctcccaaaatgctaggattacaggtgtgtgccactgcacccaacagggatgaatattaatcttaagtgtgccttactcactttctaccagagaaacagaaccgacaagatgcacacacacacacacacacacacacacacactgaaaacctttggattatgtgattgctggggtggctgggcatatctggtacatctgagctagggaagggaaggctggaaactcttgggcaggattggatcctgcaatccacaggcagaattttgtcctcattggggaaacttcagttttgcccataagatctttcaatatattggatgagtcctattccagttatcaacaataacctcttttacttaatatcaactgattgtagatgttgatcacatctgcaaaacatcttcttagcaacatgaaggttagtatttgtatgaatagctgggtagtatggcctagcctgtcatcaaaatgtgaggcactttgagctttaaataacaaaggactttcaaaatatcttctccttttgctgaactgagaagcctaaagaggctcattctccctaagaaaacagcagtcagatcctgagtgatctcgggtgtgagaagaggtatgattatggggccagaaagctgcagtggctgtggtcaatgatagaggtaggaaaaaggagaaaatgtggcacctgccttgggagggttttgagacagggattttaacaaggagtttgaagaagctttggtatgtgataagtgaggcaccatctgtgctccagcttcacaaaaaaacctttcaggctgggcacggtggctcacgcctgtaatctgagcactttgggaggccagggcaggtggatcacttgaggtcaggagctcaagaccaggctggccaacatggtgaaaccccgtctctactaaaattacaaaaaaatttaggcgggcatggtggcatgcgcctgtaatcctagctacttgggaagctgaggcaggagaatcgcttgaacctgggaggcgaaggttatagtgagccaagatctttccacttcactccagcctgggagtcatggtgagattctatctcaaaaaaaaaacataaaaataaaagtaaaagtaaaccaaaaacttcagtacgcatctctcatagtctccagcactcttggagtgggacttcactcttcatttattgacactctggttgtgtgtcactgtggtaaggcaagatcggggtagccccagggcaattacattagagttgcacaggtttataggagtcaatgaatgaagaccagtattggaaacactcatgattgctatgtttggattgctgtattatagtcaaatttaggtggcagtaaattgagaggatgctgataccagggtacacacagtctggaacaaagactaacagcaaataatagatgctttttcttaagggatgatctggagtcttggtcacttgacctgaaggttccaattcaaacctaattatattacctccttcagcacctataattttatttttacaattccccaatagtagaacacagaagtatatattgtctcggttcttaaagcaaaactttcttaaagttaattttgaagcaaaataggatgatctttttgttcatcttattttcagaatgacataaatttggatttgttaactttaaaattgccaaaccagctggggatgtgaatttattttcacttccatgcagcactgagaagcaaaatactaacagtagggtcagagtcctccaggtcagactcctctggcctccagtcaatgttaattagggactttcaacagctgcaggaagtcaacaatttaataagaaacatcacaaatacctaatttgctcagcatgaccacaacacgaaattcccacatcaacagagagacaaatactgattcaagcaatgtgaatcaaagcagatgctagctggcctcctcctgttaaattgattcagaaatgtaggacatagttctaagacgaggctactgttggtcgcatatcaatttagttaggtgttaagagggaaatttatggcactaaatgcccacatcagaaagcgggaaagatctgaaatcaacaccctaacatcacaatcaaaagaactagagaagcaagagcaaacaaatccaaaagctagcagaagataagaaataactaaaatcagagcagaactgaaagagatagagacacaaaaaacccttcaaaaaatcaatgaatccgggagcttttttttgaaaaaattaacaaaatagatagaccactagctcgactaataaagaagaaaagagagaagaatcaaatagacacaataaaaaatgctaaaggggatatcaccactgaccccatagaaatacaaactaccatcagagaatgctataaacacctctatgcaaataaactagaaaatctagaagaaatggataaattcctggacacacacactttccctagactaaaccaggaagaagtcgaatccctcaatagaccaataacaagttctgaaattgagtcagtaattaatagcttaccaaccaaaaaaagcacaggaccagatgaattcacagctgaattcaaccagaggtacaaagaggagctggtaccattccttctgaaactattccaaacagttgaaattgttccttcctaactcattttatgaggccagcatcatcctgataccaaaacctggcagagacacaacaaaaaaaggaaacttcaggccaatatccctgatgaacattgatgagaaaatcctcaatgaaatactggcaaaccaaatgtagtagcacatcaaaaagcttatccaccatgatcaagtcagcttcatccctgggatgcaaggctggctcaacatatgcaaatcactaaacgtaatccatcacataaacaggaccaatgacaaaaaccacatgagtatctcaatatatgcagaaaaggccttcaataaaattcaacattccctcatgttaaaaactctcaataaactagatattgatggaccatatctcaaaataataagagctatttacgacaaacctatagcccatatcatactgaatgggcaaaagctggaagcattccctttgaaaactggcacaagacaaggatgccctctctcaccactcctattcaacatagtattggaagttctggccagcacaatcaggcaagagaaaaaaatacaaggtatttgaataggaagagaggaagtaaaattgtctctgtttgcagatgacatgattctatatttagaaaaccccatcgtctcagccccaaaactctttaacctgataagcaacttcagcaaggtctcaggatacaaaatcaatgtgcaaaaatcacaagcattcccacacaccaacagtcgacaagcaaagagccaaatcatgaatgaactcctattcgcaattgctataaagagaataaaatacctaggaatacagcttacaagggacgtgaagaacctcttcaacgagagctacaaaccactgctcaaggaaataagaaaagacagaaacaaatggaaaaacattccatgctcatgaataggaagaatcaatatcatgaaaatggccatactgcccaaagtaatttatagattcaatgccattcccatcaagctactattgacattcttcacagaattagaaaaaagttctttaaatttcatatggaaccaaaaaagagcctgtatagccaagacaatcctaagcaaaaagaacaaagctggaggcatcacactacctgacttaaaactatactacaaggctatggtaaccaaaacagcatggtactggtaccaaaacagaaatacggaccaatggaacagaacagagacctcagaaataacaccacacatctaaaccatctgatcttcaacaaacctgaccaaatcaacccatggggaaaggattccctatttaataaatggtgctgggaaaactggctagtcatatgcagaaaattgaaactggaccccttccttacaccttatacaaaaattaactcaagatagattgaagacttaaatataaaaccccaaaccatgaaaaccctagaagaaaacctaggcaatgccattcaggacataggcatgggcaaagaattcatgactgaaacaccaaaagcaattgcaacaaaagccaaaattgacaaatgggatctaattaaaataaagagcttctgcacagcaaaagaaactatcagagtgaacagacaacctagagaattggaaaacatttttgcaatctacccatctgacaaaggtctaatatctggaatctacaaggaacttaaacaaatttacaaaaaaaaaaacaaccccatcaaaaagcgggcaaaggatatgaacagacacttctcaaaagaagacatttatgtgccaacaaacatatgaaaaaaaactcgtcatcactgatcattagagaaatgcaaatcaaaaccacaatgagataccatttcatgccagtcagaatggcaattattaaaaagtcaagaaacaatagatgctggcgaggctatggagaaataagaacgcttttacagtgttggaaggaatgtaaattcctttaaccattgtggaagatagtgtggtcattcctctaggatctagaactagaaataccatttgacccagcaatcccattactggatatatactcaaaggaatataaatccttctactataaagacaaatgcatttgtatgtttattgcagcactatttacaatagcaaacacttggaaccaacccaaatgcccatcaataatagactggataaagaaaatgtggtacatatacaccatggaatactatgcagccataaaaagaatgagatcatgtcctttgcagggacatggatgaagctagaaggcatcatccttagcaaactaacacaggaacagaaacccaaacaccacatgttctcactcataagtgggagttgaaccatgagaacaccttgacacaaggaggggaacaaaacacttcgggagctgtctggggctgtggggaaaggggagggagagcattaggaaaaatacctaatgcacatagggcttaaaacctagatgacaagttgataggtacagcaaaccaccatggcacgtgtatgcctttgtaacaaacctgcacattctccacatgtatcctggaacttaaggtaaaataaaataaaattttaaaaaaaggacatcaacaacagacattgctaagaacaaaaataagtaagtgaatttcttgactggtagaaatggattttttggaattctatgtaattgtaaacaacagattcctttcataaaaaatattcaagtagaaaaggaataatgaatctttttcactttataattattcaagaattgctagaaaggttcacatgcatatcaaagatgatgaaatataatattatttgcctctatattgattctctgattggggaacattgtggtttttttttaaacattaggctatttccgtttcatgttatatatctgagttcctcacactttacttagatccaaggagggaaaaacaagtacaaattattacaaggaccattcttccacacgttaaaggcatgcctacaagctctggagatctttctcatgattatattagatacctaaaatgtctatattatcatagctgtctaggaaatgtgttataaatggcacatatgtaatcttaattaatttacatggaggggagtgtagttaggagggaaaaaacagcttgataaattataaaattcctctttaactttgtatctcttttccatttcttttttacagtttgttcttaccagatgaattagtaaagattacacacacacaaatgcacacacacacacatatctgtgtatatctcctggcatgtacacatgtaatacataatgttacttttgtgaaccaagtgtcaaatttcactcactgggtactcttcacttttatgggtcatattctattttagaaagaaggatttattgaggaagtgacttttgctacagtgcacctgttggctgcccattctcacaaaggcctttctttccaattgctactcccaatatagcctcatctaatgtaatgcagtatcctgtgtacaactgaagctctctgatctctccttggctctgcatactaacttcgtttcctcaaactgcctttctctctgactctggagccatatctgtggacaactccaagcttttgcctccttagcttaactatcacaaaggaaatggaatcctgcttcaattcttaataccagagtgctgaatctaggtattctctcttgggtcacaggctcactgctttgaaccaactgctgcagagagaggggtgaagttcatgattgtctcagcttgccaggatcaaatagaacgccacaattgtcatggaggagatgaaattccttctagaaaaagggcatggttaaagaataaaggggaggctgggtgcagtggctcatgcctgtaatcccagcactttcggatgttgaggcaggaggatggcttcagcctggaagttcaagaccagcctgggcaacatagtgagaccctgtctctataaaaaaaagaaaagaataaagggaaaagagatgctaagaaactaaaagtaacagctgtctactactgaatatttgtcttacttcagtttcaaatatcttaaacttaagccattgcaaaaaaatggtaaatattcattatctaaaagacaaaaccataatactcttttaggaaggaacctagaaatttttaatgggttttaaatacttaactaaataatagatgtcgatggtttaatacctagatttatattttactgaaaaataaagtttttctataaaccactaacacagactaggacaaaaccattaaaaccaaaagaactagtttaacacttgctcgtgctaatgtgaacacattatcccaaaataaatgaaaggccaaattcttgatgaagctgacacaatacttaagtcatgtaagtgtggacaaagatcaaaagtttaattagaaaaaagaaaatacacgcaatttatccctagcacctctaatgtcgaaaataagttccccaatgatcagggttcattcatgttcatgctctcaggaaagccaggtattaaaactgttctttgtctaattacatcatagtatgagttatgcttattatgaaccgtagactgtttcaatttcaatctactttttaaatgtcataattcaaacaagcagtaatcgaagtgactgtgttgtatcaaaacgtgatgtctgtagaggaaagagagagatgaataggtgcagcatagaggattcttagggcagtgaaactattctgtatgatattgtaatggtgaatacacgtctaaaaacatagaacgtacaacaccaagagtgaacccttatgtaaactatggactcttgtgatcatgaggtgtcaatgtccgttcatcagttgtaacaaatgggccactctggtgggggatgtggatgatgggggaggctgtgcatgtgtggggaagggtggggaaagggaaatttcttacctttctgcataattttgctgtgaacctaaaactgcccttaaaaatatagtttatcaaaacataaaaaaaaacagtaaaactgtccactatatctggtttggaagggattattttcaaaggtacacatagtttgcaaattatatccactggtacaggtaacaggagatgctacactcctgggtcgccctagctcatttctctcccatctgcatgtcccaatagacaccatgtttaaatctgtgcccatgtattgctgaagtcctttaggcatgaagaattccagtgatggggaattctctgtaaatttgcattttgggagtagaagggaggggtctacacatggcagagggtgtgagccattagggatatcagggccagagatgctggcaggtaaagattggcaacatgccaggtcaacatgcccaggcaggaagtgatgccgcttgagctgccttttcagagcagtcaagactggaatatccccaactaaccgagcaacccctgaaaaatcagatcagacttacctaaaggaaaaagaatcaggctagggaaagaagaatgaatggcaaagcttaatgacttcaatggtaagaatttatcactaagaagcagaagcaaaccactcatgtggagaacagatgttgtggacttgatttaagtagtaccaagtgagggtgaaagcttgcaggaagacatattcaggaccagtctattagaaatgcagttttagtcccaactaaacctagtgagtttacatccattcacttgtcttgcgtttttctctctattattccccagccacgttgcatgaacattagtggtccaagcaaggggtgttgcgaagggtcgacccactgaaaaaaaattgtcctgttatttgccttgccccctgcccccaagtgttaagctgagtgtggagaaccattccaggccaagtttccttttcaaatgtgctcttgttagcttttttttttttttcaggaattcttcagtttctggtacaccatgctcactatacagctgttttcccataatctctgaagattagagtgggaggggaggatgcatttatcttgaaacataaatcttccatttaagttgtgatagtaaataacaaggggatcaagaatcagcctcttctttctcttcttcgctttccatgctcaaaaagactcactgccaactgaagtagcttctctgcagggattctcttgctttctgctccaggctcgctgtggacaactccatagtttgctattgctcatgacttagaattctaccttgttatattatgcttcctcattacaagcttcaggggagatgtacattggctagggacagatcacatatttcttactttccttctctttatccccccgaagactcctcataaagactttactgaacagtaggggtaaccaaggaaagtaaggccccattatcctttttaagcaaaatcctgagcatgcataggaaagattcttcaagtcatcccaggatagggtggtgaaaactggatttactacatggcaaagtctcaaaacaagcaaaggataaaatgcatttaattgctttttttaaagctagtttgtgtaagaatccaagtgatttatttttcttttagcacttatcaaagatgttttatagttcaaatctgaactttttctgatgtataaaaggcacaaaataagttatatgaagttcttaatgacatgactacagagtttcccagttgaaataagttaaaagcaaatactattgtgaagattttctttcatttgtttataatatttaatccaaagttggtgaaaccttagatttccctcttgaccttgaccttagctctacttggcaaattattcgaattgtagagtatttcttgttgaggaaagcattcaatgtttggctcaaaaatgtacaggcactgcaacattggacttaagagagaaaagctccagaatacagcttaaatagatacatggaatccattcacatttttggtgttctggagagtctcaactctgtatcactggtgtcattagagaggctcaggactagaagaacaaggtggccatcaaccttgtcaacatacaggaagttatttgaaatatttgtaatgtctaaaaagcagccaacaaaatggtttacaaatacaacgaagtagataaaacccattatttccagaggtccttggtcatgatgctgggaactttcaattaatctaaggaattggtcaccagcatatgattttttaaattcttctttctatcattaaaaaaataagagtattaaactagaaaagtttctgaggtgagaatcctatggcaagtggctttgttttggttcaggatatgtttttggataagaaagaaaatcttttatgcagtctgaatatttaaatatttaaatttaagattgataataattgatgcataccaagaagagtatggagatcctggagtagtgaccaaaacaaacaaacaaataaacaaaaaacacacagaaaagaatagaacaagaaactcctatgataaatttgattctgtttgtcatcgagcaatttttctcttctcctatacacttccacagctgttcatcttccagatgttctctcttgtgaagccttgtcttttaagaggttcatgttccttcaagataaatcattcttttccattccccaaagtattacttgctcaaaacaagccattctcctaatcctcatttaaactttcctaaatttagcacaactcttttggacactaaactgaacaatttataaacttgaagtcttggtggagggcaaaaactgtccactttggcagccaaatggaaggaagccaatcttccctcttgccttcccctgttaacctgggggcaggcaggttactcaagcccaactaataagatgctcctgctcaagtctttggaaccagaggaggggaggcaaagataaaagatggtagagattattcacaatagcaaagaaatggaatcaacgcaaatgcccatcaatgatagactggataaagaaaatgtggtacatgtacaccatggaatactatgcagccatgaaaggaatgagatcatgtcctttgcagggacatggatggagctggaagccagtatcctcagcaaactaacgcaggaacagaaaactaaacaccacatgttctcacttgtaagtgggaactgaacaatgagaacacatgaacacagggtggggaccaacacacactcaggcctgtcagggagtggggtgggaggaggaagagcattgggaaaaatagctaatgaatactgggcttaatatctaggtgatgggttgataggtacagcaaaccaccatggcacgtatctacctatgtaacaaacatgcacatcctgcacatgtatcctggaatgtaaaattaaaaaaacaaaagatgttagagataccatttcatggtgtccatattgagagcccagcagcaatgacagcttcgagaattcagtggccgcatgcaacgctgttggcattgacaatcctgcggtagttgtctggcgctctgaccgtgaaacagattgtccctgcagtgtgacattagttgtattttccaactatctagcttcttctagttcttgaccacattttgaggctaagcctatagctttcccaacattcctgtgaactctctatttctttacaataaagcctttaacagctggcagatttgactcctattatttcaaccaagattgttacactgcctacaaagtaattcttcgaggctttggcttatagtgggacccttcttgtgtttctggttttggcaccgaggcatatacgtatgtattcatgggtcattatgtagaatagttggcttctcttcgcagaaagttggcagagagaaaaggagattcaacgtgtcagtgtactttgctttcttgattcagattatttttctataaactgaactatgtagactaagggaatcaggaaggcagagggttatgtgtgtccactgacccttgttggtgcctgtctccaatgaggaactcttctgatttagacattcttgtgcttttcttttcccaatgggtatattttcataccatgtgctgttccaaattcctgagtttctggtgagaaccacatgttgccttgttctgtgtgtcttcactgggtgtatttttatggtgcatgcccattactacccaaccctttgctcctgttgctcagacagtcatgatttgtaataagcaactctgttcctcaatcccaattgccccaaagcgacacgaaaaacaaggttgagttggagccaagggagagagaaaaccctcggtaatgagtcatgggatagggcaaaacaggcacgcagattatccctggcttcttaggggcttcttcttcagatgtgaggctgctgcttcttctccccagtatctttttgctttggaggtcagatggcaattttggtggagattatactgtggacactgtgcttgtaagacttcttccttctcctgcatgagctatgtatgagttgaggaatgccttcacagaatcagcaagttctcaaatagctcacatttttccaggctatcatgggtatctcccatgcattcataggtttgtagatagtcaggtatgtatggagagttaagtttctcagattttctatgcttgtggacttccatgtttcctccattaaatttcttactggtctgcttactgctctgaattgcattccctgcctgcagttgtagagctgtgggtctttgctgccagcttcaatctggcattgccatctctccctacctgtaatgatgcaggttctgaagactgagtgtgttggaaaggacgaccacagctccaggaaagaaggccacatacccaccactactataccagatacagcagcaccatttcaagaggaaaatcttcacagtttcttgtgtctcatttttttttgttgttggtcatttttttcagtacctcaaaataattattttaaataatttagtccagttttgtgcttgttttctaggaataggaattatctgacctcatgctgcctttactggaaatagtcttacaattgttctgggaaagaagacaaatgaatttttatgggactctcagttctcatatatgagtgtttattatatttctcatggaaaaaataaagttgctcttgatagaatgtcaccactatggagttattttctgatatacctacaggggttattttttaagatttcttttttgttttgtggaatgttccagactgatacagctctctctctagaggtcttttgcagctgcagtattttcaagggttcatttgttattaaatctggctggccagagtaggttaattcctttgagatacagctgcagccatttttaatggcaaaagacgctattttcttttaaaatcatttgtacaaatggagtatcattttacatgttcctaaatttttctccatccttttcctcctctcattatgtgttttctcgatattgttgctgttttagttttttttttttttgtcattttactgttgtcccaatagtttggttgtactttttaaataagctatttgaactcctttttatcaatatgagagtgtatgaataaaaaaagagaacactatatttaataattcaatcattttcttttgaaattcttccatgtttacgctgagacacattcattacatggggcaactaagagctgtggaataacccacaatctgctttctgcatctgatacttacaaaaagctcaacagagtaatggagaaggagcaaataaacctttcaacctgtgtttctcagtcttttaaaatctgagatccctttaaatgagaaaacatactctcattgtgctgttggtgttatgtgaaatgtacaacaaaatataacaacctcagttaatttgagagtaccttaatctatacgtttaacagtttaatctttttttttttttttttttttttgacaatatcttactcttgtgcaggctggagtgcaatggtgcaatcttggctcactgtagcctcaaactcctgggctcaatccattctcccacctcagcctcctcagtagctgggaccacaggcatgcaccaccatgcccggctaatttttattattttttgtagagatgtggttttgccatgttgcccaggctcatctcaaactcctgagctcaagccatctgctcaccttggcctcccaaagtgcggggattacaagcatgagccaccgtgcctggcccagcttaatatctttgaactccaatggaggaggaggttaaggttctaatattgcctcttggaacattgctctacttctattttaattcacaaatgtaattagatgttctgaaaaagaaatgtagctaatttgatttaatggtatcaaagtctcaaatgcaacatgaatgcattgggaggggctgagaacccagatccttacctgctcaagtgacctgttggattactaccaactctaggctgggcacagtggctcatgcctgtaatctcagcacttcgggaggctgaggctggcggatcacctgaggtcaggagttcgagaccagtccggccaacatggtgaaacctcatctctactaaaaatacaaaattagccaggcgtggtggcgtgtgcctgtaatcagctacttgggaggctgaggcaggagaatcacttgaatttgggaggcagaggttgcagtgagccgagagtgcgccttttaactccaggctgggcaaaaagagtgaaactacgtctcgaaaaaacaaaaaaacaaacaacaacaacaaaaaacaaccaaaaaccaaaagagtactaccaactctatacttaccaatactctatactctatacttacttacttactattattgctatcaaaaaataaggaaatggtttcagactatgtgcttaccaattccttgtcccgaaacctttggagtatacacttaagcagcatggcttaataaaaacacaaacaaaagcagcattgtttttgaagtctgggtcatcagacgtaacttgcatcgtggttttgagtggagaagaaataatgcttattgtggttttaccttaaattggaatatttatgttaattgcatcattagctcttcgtcagtagtattagaggttccaatagtttaataggcttttcctgcttctttaaattcaaacttctcaaacttttgtttttctagagagctctggcaagtttttgttgtgattcaaaatggcagccagtcagctccctgcctctccagcctgggatcctttagccccatcctgtcatcccagggctcattttcttcctttctgggttctttgccaacattctttttctgccctgctgggatttcttaaaggagcaaggcttttcacctttctgaactgcagaatccctattccctgagacacaacaatattgagattagaccagataataacccaaataataatcttgcagggtgcaagattggattcaggaacaacagggtggaggctaatgcagaaatctgcgtgctagatgatggcagtttggactagggtggtagcagcagataaaaagaagtgaatatctttgggatacctcttgaaagcagtcaacagtaccattggatcacccgaggggaatgggggagagagaagtaaagaatagtctctagcttggcaactagggtgtttctatttactgagatggagaagacaaagaaatgttaagacttctatttttgatgcattttctttgagatgccaaccagatattcaacaggaaaaaacatccaagtggttggatatatgagcgaggctcgaaagaaaggtctgtctggtatttgaaagttttgctttaagagattggatttcaacatttctcccgcccccttcctgtgtgctttccagtattgcaaaggcctggaatttaaggtgctacaaagcctcctctccttagtttcagaaccaccacagtggttgcagtgagccaagatcgtgccagtgcactccagcctgggtgacagactgagaccgcatcgaaaaaaaaaggacttggatacacgctacctctcaatcccagcaccaagacttcaatcactcaggctcccaaaggctaaactctcaactccagaacctctatttagtttaggggtagaccttgttttattgcacttcccagatactgtttttttacaaattgaaggtttgtggcaactctgtgtagagcaagtctatcaacaccatttttccaattgcataggctcacttcatgtctctgtctcacattttggtaattctagcaatattttaatcttttaaattattattatatctgttatgatgatctgtgaacagtgatctttggtgttactattgcaattgttttgggccactacagaccattcccatgtaagatagcaaacttaatgaataaatttgtgtattctgactgctccactgacaggctgtttccctatctctctccttctccttcagcctccccattccctgagacacaacaatattgggattaggccagataataaccctacatggcgtctgagtgtttaagttagtggaaaagtcacatgtttctcattttaatcataagattagtgaagaaggcattttgaaagctgagataggttgaaagctaggcctcttgtgccaaacagcaaatttgtgaatgcaaaggaaaagtgctatttgaaagtgctatttcactgaacatatgaataagtaagcaaaacagccttattaccaatatggagaaagttttaggggtctggatagaagaccaaaccagccacagcattctctgaaaccaaagcctaatccagagcaaggccctaattctctgtagttctgtgaaggctaagacaggtgaggaagctgcagaagtaaaattggaagctagcagaagttggttcatgaggtttaaggaaagaagccatctccataacataaaagtgcaaggtgaaacagcaagtgctgatatagaagctgcagcaaattatccagaagacctagctaacataattgatgaagatagctacactaaacaatagtttttcaatgtagatgaaacagccttctattggaagaagctgccatctaggacttttcccatagctagagaatcaaagctattacctggcttcaaagtttcagaggacaggctgactctcttgttaggtgataaaaatgtcgctggtagcttaagttgaagccaatgttcaattaccattcaaaaaaatcctcaggccctcaaatgatgctaaatttactctgcctgtactccataaatggaacaacaaagcctgcatggcagaatatctgttgatggcatggttcactgaatattttaagcccactgttgagatctactactcagaaaaaagattcttttcaaaatactattgctcattggcaatgcacttagtcaagagctctgtttgagatatacaaagagatgaacgttgtttccatgcctgctaacacaacatctattctgcagcccatggatcaagaagaatttcagctttcatgtcttattagttaagaaagacatttcataacgctatagctgccatagataatttttcttctgagggagcttggcaaagtaaatgaaaaccttctggaaaggatccatcattctagattaattacatttactaattacattaataatatttgtgattcatggaaggagatcaaaatatcaacattatcaggagcttagaagaagttgattccaactgtcatggatgactttgaggcagtccaagactttggtggaggaagttactgcagatgtggtgaaaatagcaagagaactagaattagaagtgaagcctgaagatgtgactgaattgctgcaatctcatgataaagcttgaatggacaaggaattgcttcttatagatgatgaagaagtggattcttcaagaggaatttactcctgatgaggatactgtgaatgtagttgaagggacacaaagatttagaatattatataaatgtaattgatgaaacagcagcagggttggagatgattgagtccaattttgaaagaaattctactgtgggtaaaatgctatcaaacattattgtatgagacagaggaatcttctgtgaaaggaagagtcaattgatgcagcaaatttcgttgttgtcttattttaagaaattgcaacagctccccaatcttcagcaatcgtcaccctgatcagtcatagccataaatattgaggcaagaccttctaccagcaaaaagattatgatttgctaaaggatcagatgatcgttagcgttttctttttagcaataaagtactttttcattaggatatgtgcatttttttgcacataatgctattgcacactcagtaaactagagtgtgaacataactttcatatgcactgggaaccaaagaaattgtgtgacttgctttattttgatattaactttattgcggtcatctggaatgaaacctacaatatcttcgaggtcttcctgtaggtctcatctatatttttcttagttgtgaggggaaggatcaggacacaaattttaaattatcaaaaaaaaagagtaaggacattctggaatttataaaaagaacattaagcctctcatctttcaaaatcttgctatttgccctctactctgtggtggtgatggtttaatttcttccctcaatcctttcacagctggtaatggtctccttattgaaggagaaaaaggatgtctcttgagacactcagttccgaccacttaaagacactgcatatcttccctgttctctttagcatctcttgttcaatgtatttcttggcctctctgggatcttagacgattgtacatatttttttaattgcaggaaaaatcctcccctatagttttaattcaataaagtctttaaaagacttcgttgaaatttgaaatttgcacaggcctagagagaaggagaggtaagaaagcagaaaagcaatttaaagcacagaaactggaataggcaggagcccaggacagagagacagaaaccatatttccttgaccctagtttacctggctgaaaagtgaagagttggccgggcacagtggctcatgcttgtaatccaggactttgggaggccgaggcgggcagatcacctgaggtcggcagttccagaccagcctgaccaacatggagaaaccctgtctctactaaaaatacaaaaaaattagctgggtgtggtggcgcatgcctgtaatcccagctactcgggaggctgaggcaggagtcggaagttgcggtgagctgagatcgcgccattgcactccagcctgggcaacaagagcgaaactccatctcaaaaaaaaaaaaagaaaagaaaaaagaaaagtgaagagttggttcattaggcatcagaattgtttcttccatgccaataaattaattttaattgaacgtatctttcaaatacaatttggtatagtgtctacacagagtaaaaagaaaacaaagagaagttaaaataattttatagactatgagaagaaaagaaggatagtataagattggccataagaagcaaaaggaattacctttcacgcagcaatatgtttcctgccttttgtggcctataaatataactagttatgacatgttgggagtaatataatgttttcagttccagttttctcactggcctctgaaatgtaaatatctgccagtcagtcatcaactttttacagttcaccatgctctgtgtggttctaggtttgtaataatggatttcctttgcagatatatcaggtgacaacagcaccagatcttgggctcacataaagccacgtgaagagttgggcagggttttccttgcaaaagagcaggtacaaaacataagctcatttgacacagttgtcagtctcattttcccaaaaatgtgggtgtctgtggtatcaatgctagttggatccataggctgaataaaaatcctttttggtgctgaaactctgcctgccccgggatatctctcccactgacctcccaagtaccttcagataacaaagattgagctagtttgtactgtttctttggatgacagcatgaattcttccattgaaataaatttgtttagtgcattatttgcagacatctcagttggcccttgggaaatgaagtaaaaaaaaaaaaagaaagaaaaaacaggtacattttgatgtgtcactgaagaattgagggaataggagcaggaagggaaccatccaggatgtgagagaacttggagttctgggaacagccaggcagctgcttggtgctggtattgcttttgtcatttttggttgctatggtcaccctctgaagtgggtactgatatttccattttccgggtaatgaaacaaagtctgtgtagatgataaatggcagatcccagattaaatttaggtcaagatcttaatcactgtgccattcagcagcattcactgcaggaagagagtgaattttagtcatctattgtttcccagaaggaaaggtgtgcacaaaactggcagagaaagctcagaccatcatctccctgactcagaaaatcttgcttaattatgttttacacatgtagataatcatgtatcttgtacttttagaggattgttctaagaagtgtttctgctttccaccactttttactgccttaatcatgatgtggtgttttctttgtttacattttggtagaagattgattaaagcagcaaactagctctaattgtgtacttataaatattctttaatcttcccaagtgtttatattttctcttcctaatttgattacaagcatttcaaaaagcagaactatatccaactcatattgagttctccaaaaagtgtttaataaatgcttggaagcaaaatgggctaatggaaactttatgaacttcaggcttaagagagaatccacttggttgtacctcttagagaaggtatatggcaatgacataattttactattattggtcctaaataacctcaagatacagtagaaactgtggtcttatttttaaaaagaatagtcaatgcaaatttcaaaatttgacagattcaaatacacaccagtgttaaatgctagtttaacacacaccacacacacacaaacacacacacacacacgtatggtattttaagattcactgtccatatgatatccatactattcaagatagtgatattagaatttaagccagtaaaagtttagctcttttgaaataggtataaatcttatcagtatataagaagtatttatgactctgggataacatattcaaagtgctgaaagaaaataaagaaactgtgaatcagatacttgatatccagcctacctactattcaaatgtgaaattggaaaaaattacattttcagataaatggaaactgaaataataatttattgccaatagacctgctataaaacaaaacaaaaacttaaaggacatgatttcatctgaaggtaaatgagactagatggcatttcagttctttagggagaaacaaagaacaccaggcattgtaaaaatatatgcaaataaaataaatgatgcgtattttctttgtttccttaattttgttgatataatatggctttttaaagcaaaacattacattatattgatggtttttataatgtacatagttgagatatgtaacaaaatgtggtgcaaggatgggaataaattgaaatatactatcacagaggttctttattatgcaagaagaaagtcagtatcaactctatatagattagtataaatttaatatgtgttgtaattcccagagcagccactaaaatgtatgtgaagagaagctgctagaaagccaatagaaaaattaaaattgaatgccagtaaaaggcaagataggaaaaaacaaggcaatagtaataactacaatatctgaaaaaagagacacaaatattaaatgatacaatcctatgaataactacattaaatgtaaatgaacttaacattccgatcagaagataaagactcatacttgatataaaggcaagaactaagtatatgctgtgtacaagagatacatttgaactacaaagacacaaatagactaaaggtaaacacatggaaaaagatataccatgaacaagatagccaggagaaagctgcaggaactatgttaatattaaaaatagacttcagtataaggagggacactacaaatgataaaagggtctgtgcattaggaagatataacaattttaaatgtatatttgcctaataacattgtgaaaatatgtgagacaaaatctatgaagaaaaataaggataagcagataaatccacaaacgtggatggagactttaacacacactctaagtagctgacagaataatcagatctaaaaagagatatagaaagtctaaatgacagtcaatgactttatcccaattgacatttacagaacactaaaacaacagcagcggaacacacattttaaaaagcacatctatatagatacgcatagttaacacccagtatttgcactctgagatgcctagtgagatctgtttacatacaaattaaataatgcaaacaatggtgagaggacggaattgtcagcaaagggtgtgagagaacttttgttgcaaatggcaaagttgtataccacaattgaggcattggatgatatatatataaatcctatatatatacacacacacacacacaatttgatgagttttgacaaatgcatatatttgtcaaatgcatatatttgtcaaaaaatatatatcagtgtgtttgtcaaaactcatcaaattatacatttaaaattgctgacttttattgtatataaattacactgtaataaaaatactcatcctctaaaacccaatgatgaactcttctgaatgttaaaaatggaaggaataaatgggtacaatttatttccacaaaaatatcatcaccttttatttaccaataatgcatacatacatagcttccattttcaataattgctttatagatatttttaatgatactgagtagccattactctttttttgggggggtggggtacttattttttttttcttttattatactttaagttttagggtacatgtgcacattgtgcaggttagttacttatgtatacatgtgccatgctggtgtgctgcacccactaactcatcatctagcattaggtatatctcccagtgctatccctcccccctccccccaccccacaacagtccccagagtgtgatgttccccttcctgtgtccatgtgatctcattgttcaattcccacctatgagtgggaatatgtggtgtttggttttttgttcttgcaatagtttactgagaatgatgatttccaatttcatccatgtccctacaaaggacatgaactcatcattttttatggctgcatagtattccatggtgtacatgtgccacattttcttaatccagtctatcattgttggacatttgggttggttccaagtctttgctattgtgaatagtgctgcaataaacatacgtgtgcatgtgtctttatagcagcatgatttatactcctttgggtatatacccagtaaagggatggctgggtcaaatggtatttctagttctagatccctgaggaatcgccacactgacttccacaatggttgaactagtttacagtcccaccaacagtgtaaaagtgttcctatttctccacatcctctccagcacctgttgtttcctgactttttaatgattgccattctaactggtgtgagatggtatctcattatggttttgatttgcatttctctgatggccagtgatggtgagcattttttcatgtgttttttggctgcataaatgtcttcttttgacaagtgtctgttcatgtccttcgcccactttttgatggggttgttttttccttgtaaatttgtttgagttcattgtagagtctggatattagccctttgtcagatgagtaggttgcaaaaattttctcccattttgtaggttgactgttcactctgatggtagtttcttttgctgtacagaagctctttagtgtaatgagatcccatttgtcaattttgtcttttgttgccattgcttttggtgttttagacatgaagtctttgcccatgcctatgtcctgaatggtatccattactcttaaccttctctcaatgtactttgccatcaataagaatagtcattcttattcttaacaattttaagaaggtcgtattgactatagagtattgcatttttacttgatattcacaaaaggagccatgggctataatctagtggttctcaaatttagcatgcatcagcattacctggagggcttgataaatacagattgctgggtcccatctccagagttactaattcagtaattctgtgtgaacctctggattttgcatttttagcaggttcccacatatggtgatgatattggcacatgaactatattttgagaaccaatattatgaagactatggagaataaaagtgatcatcggtttttcatgtgcgttcaagagagcaatttgaatctatacatgaggggcagcacgcaaagcacagataaagttttttttttggtccaaggatctccagagtcactcacttatttgagagagactgttagccaaaatatattgttgttacattaagtatttaattatgtaccttttccaggaatgactcaacaaaggaataaacttctttgctcaagaaatacatgcaattttaatattaatttcaacattttctcatagtctggatgaaaactccactaacataaaaaccatgtcttcttgtttagcttagtaatacggctagagtaagcaatcctaactatcaatggtgaagtaccctgtatattgatgctcttcagtttttctggcttagaatgttgttgttcttttttccccttatgaattcaaagttttctttaaaatgaaggttaaattccttttcactcataaacatcttcattagatagccttagttcaaaatggatcttcttgatttttgtagacagtacctttgttgacagcatgccatgtaacatttgattatcgttatctttttgctttctactaagtatgtgtaatttcacttctgattaaattgtaagcacatcaagaagcttccgggctttctatgtccaccgccttctgaattaagttatcaataagtgcttgagtcagcttgaggtagtgggaaaaacatgggctttggtatcagatgttgttgaatgctggatgggctaattaccagttagtgatcttggttaagttactcatcctctttgaacacagatttgcatatctaaaaatgagaagggtttaattcctgtgaaatccaccccaactagcagcaatggagtacactaaggcttgacaaggttgtaggatttactccaaatgcatatctaaaaaataagacatatttcatgggattccaaatcccagcatatttctgtataacacaaaagttgaattagataggcaaacttaagcccaagcaaatagaaatatgagtattcttttctatgttaactgtctggttttatggttgtaaacatgaaggagtgcagtaccaggaagtatgtggagttggtgtttcattattatacttggtaaacaagagtaataattaggctaatatcacaaacattggcctaaatattagtttagcagaaaatcctattttgatggtcttaaagtccagtaattatgcttatattagaaaatatttttaatgaaatttgtaagcaggaagccaccgagttaagaaaaagacacatgaaatagaaaacgtatttcaaaactatatatatgagatttatttcacattttctacctactcagtcatgtgagctgttgctacatttgtgaactttctgaaaccaagtgacaaatatccacaaaagatcatttacaatgtagacatcactaaagtctagatttaaaagtccagtgaaaatggcacacagttggcttacagaaataaaaaagtacaatatatttgaaatagtagggtttttgttttccatttatgcctacatcatggtgttacctgtggatatgttatcaacgatattgatatcagatactatgacccatgacatttagtatttttagcaataagaagcacacttaaatctatttcaaaaatatgacatgttaaattcttaggaaagtatcaactttacaaagtatcatacacctagaaaagtaaacatgaatttctcagtctaggttagaaaaaaagtgttttaagatttttattaaaaaaatttaaacaaaatttgtttatcttatctagaaacttatacgatcatgtaaaagtaaatttatttattcagtattatacagaacaatggaaccagtatggcctgcagagatacagaggctgtgagaggaggttggcttagtcaaatgcctctgtccacactgacatggcacttacccagcacccgaacctcctcctcccaccacacggagaaccatttctgtacttataatatagtttctaaaaatagaacattgctgctataaaaataaatgtatttaaaaaaaaccacgggtttaaacaggaacacagaatttggggttttaaggctcttcctgggggaggagcttccacttcactgagggatcaaaatcctcctcaaaatcacccagctcctgctccttggagagctccaggaaaacctgaaagggaggaaggaaataaagagaggagaacaatgccgtgctgcctctgcagctcccagggaatgttttatacacatataccatggatgatacgaatccctaaaaatgacccacctgctccagggtagactgtgagaggctgtactcctctaggtcaaagctctgtttaactgcatagggatgaacatgtattagttcatatatttcatatctagaggtctcataaatcagcatatagtacaaatgatatattttttaaaaatcttaaataggttaaggtaatattcattcatgtcttaagtacatcgttcagttaagaatacaccaatgcatttacttaggtttgggagaaaaagcgcttgaattatgcttgtatgttgtgcagtttttgcgaactgtatttaaaggagaaaatgctactgagtaagctttctttcttgcctgtgggccagtgggttttgcacattcaacacagaaacaggtggaaggcagacatattttgaaaaggcttgtatcagaagattatggagaaggatttgtgagcctttttagagagcaggtatcttcacggacctctatccaaaaaccattgcagcttcctctgattgggttaggaactgttcttttgaccaaaatagactgggagaggcggttagagctctaataggagctcagcagattggaaatatgccaccaaaagtttcaggtcagtactgggcttaatgccaacctggagagtgctgtgaatgactacgtggcccagaaagttggagagctcacatacatcagagaatgaaaagaagatgcattactgtgaccacagatgctctcaaggagagaatcagacaattcctgatgctctagcaagttagacaattcctctagaactagaagatctgaatctcttccttagggcagaggataagcaagcaaagatatatcactgagcagtgacaatgaaaacagtatagcgagagagttctgactagcacagttcagagtagcagagttaatgagctaaaattgcaaggaaaacatgaacctgtgatgacagatgcagggaagttagttctaaaatgtgacagatgcgaggagattgtttcaatgaccagacaggagtcagtttcttaatatacaggctaagacagtaaaataatatgccagtccacggaaaaatttaattttaaatatgtatgcatagatgtttcaaaagaaagttttcttaaatgcatatataactgagttttgacttaggttttaccaacatacatgcaaaaatacatgacaaaaccccacaaagcaaaagtgaaaaaaatcactctcattatcccctggcacagacacagagaatccctctatctccttggtttgggtcttcctaaaattcaatttgagactgtaactttaaaatgtaatgcattttgtcacatttcatttttgtcataaaggtgattattttatgatttgaaattatcttctttccagggtcgtacttcaaagtcatacttcttacccttctctaatttgaagaaagcttgggctaaaggttgcacatcttccactggcaacttataaaccatcagagaggagtacctgagagaaaaggagaggtaagaagagtgataccacttgtgccagatgtgaactgatggcaatcatctctctggtctttttttttcttttaaaaaatggtgttaggaacatttaacatgagatctaccctgttaacaaatttcgaagtgaacaatccagtactgttgactatgagtatgtagggtcccccagtttccttcacatttttctgtgttctgaccaaaaatcagagggtcttgactgctctgtcatctggccaacagaaggtctttcccagctggtttgaacccaagctagggccttgaacattcccaggaacagataaagctattcagattgttgtccaaaacaactaaccctgaccctgtgccaaattccttaaaccttcataaaaactccataacctgacccctcactgtagacatgcctaggtagaacaccccttttctctcactgttcatctcgaaaattgctgcagcccactctgtaaggaagttgccctgataaatgatttggactgatcactgtggacttagttctctttttggaatcccaaccggccccatcttgggacagtttggggaactctcttgtggaaactcccctgccactgtgtttggggtgattccggctgcaggttcagtgggacaaaagagagtataatgaggtacagaagatctctaaagcttattcatcttgcttaactaaaattttacatctatgatgagtaacttctcatattcttctctccccagcctagtactatttgattctatgaatttgactattttagatatcttataagtagaatcatgcagagtttgtctttatgtgactgatttagttcactcagcataaagtcctcaaggttcatctgtgctgtcacatgttgcagaatttcttttcaaggtcagatagtatttcattacatgtacctaacacatttacttcatccatttatctctcagtgaacacttagactgtttacacatcttggctattaagaatagtgctgcaatgaaaatgtgggtgcaggtatctctttgagatcctgatttcagttcttttggatacatacccagaaatgcaattgctaggacgtaagatagttctatttttgatattttgagaatctaccatattgctttccatagtggctgcaccattttgcatttctaccaaaagtgtgcaagcattccaatttctccacctccttagcaacagttatttttttggggggaatagccatccatcttagtccagttttttgttgctatgacactataccacagactgggcaatttataataaaaataatttatttcttattattctggaggctgggaagttacagattgaggggatacatctggtgagggttttcttgctgtgtcataacttggcagatggcattatagggtgggaggggcactcaagagagagccaaactggcttttataacagacccactcccaagataactaacttactcccgagataacctatcaatccttgaatagattaatccactcatgagggcagagctttcatgacctaataatctcttaaaggtcccacctggtcctaccttttaataccatcaaaatggtaattaaattccgacatgagttttggaggggacactcaaacgatagcaccatcctaacagatgtgaggtgatatcttattgtggttttgatttgcatttccctgatgactaatgacatttaacagtttttcatatacatgttcatttgcatatcttctttggagaaatgtctattcaagtccttagcacattcttaattgggttattagtttttttttgctactggagtttaggaatttcctatacacagtcataggccacataatgatgtcataatcaataatggactacatatatgacagtgaccccgtaagcttataatggagctgaaaaattctattgcttagagacatcatagccatgatgacattatagcataacatattacttatgtgtttgtcgggatgctggtgtaaccaaacttactgtgctgccaatcataaaaaagtatgcaattatctatagtacacaatacttgataatgataaatgactatgttactagtttatgtatatactatactataccatactatactttttatcattattttagagtgtactacttctacttataaaaaagttaactgtaaaaaagcctcaggcaggtccttcgggaggtgtttcagaagaaggcattgcacagggatctacaactggaaataccatttgacccagccatcccattactgggtatatacccaaaggactataaatcatgctgctataaagacacatgcacatgtatgtttattgcggcattattcacaatagcaaagacttggaaccaacccaaatgtccaacaatgatagactggattaagaaaatgtggcacatatacaccatggaatactatgcagccataaaaaatgatgaattcatgtcttttgtagggacatggatgaaattggaaatcatcattctcagtaaactattgcaagaacaaaaaaccaaacaccgcatattctcactcataggtgggaattgaacgagatcacatggacacaggaaggggaatatcacactctgggactgttgtggggtggggggaggggggagggatagcatcgggagatatacctaatgctagatgacgagttagtgggtgcagcgcaccagcatggcacatgtatacatatgtaactaacctgcacaatgtgcacatgtaccctaaaacttaaagtataattaaaaaaaaataaaaaataaaaaataaaaaaaataaaaaaaaagaagaaggcattgctatcacaggagatgacagctccacatgtgtcattgccccgaagaccttccagtgggacaagatgtggagatagaagacagtgatgttgataatcctgactctgtgtaggcctcagctaatgtgtgtgtgtttgtgtctcactttttaataaaaaatgttaagtagaaaaaacaaatgaataattttagaaatagaaaatagcttatagaatatggatatgaaaaaagaaaatatttttgtacagccatacaatgtgtttgtattttaagttacgtgttactacaaaaaagttaaaaagttaaaaaaattttagaagtttataaagttacagaacactaaggttaatttattaaataaattttaaaagtaaatttagtgtagcctaagtgtacagtgtttataaaagtcatgtacagtaatgtcccaggccttcgcattcactcaccactgtctcaccaatggtcgcccagagctacatccagtcttgcaagctgcgttcatggtaagtgccctatacaggtgtatcattttttatcttttatgccgatttttactctatcttttgctatgtttagatacacaagttcttattgtgttacaattgcctacagtattccctgcagtcacatgctgtacaggtttgtagcctaggagcaataggatataccatatagcctaggtttgcagtaagctacaccatctaggtttgtgtaaattcactcagtgatattcacacaatgatgaaattgcttaacgacccatttctctgaaagtatccctattgttcagcagtgcatgactgtattttggacattaaccctttgtcatatatataatttgcaaataatcctcccattccataggttgcctttcactttgtcaattgtttcttttgctgtgtggaagctttctagttttatatcatcccgcttgtttatttttgtttttattgtctatgcttttgttgtcatatccatgaactcattgccaagaccaatgtcatgaagctttcctcctatgttttcttctaggagttcaacaatttcaggtcttatgtttatgtctttcatccattttgagttgatttttgtgtatggcataagatggggtctagtttcattcttctgcatgtggatatcctgttttcccaacacaattggttgaagagactatcccttccccatcatgtattcttggcacgctttttgaagatcagttggccatatattcagggatttatttctcggctgtctattctgttcctttgatcaatatgttggtctttacactagtgccatattgttttgatttgtgtagctttgtatgtgggttgttatttctataaatgagagtcagttttgtgtaggaaaaaagggtaaggtgaattgataataatcaaaaggaagcagttcacaaggagaactgggggaagggagtgtaatactcagacagtttagtgttgttggccccttggatggaagtgagtaggtgctgtccagatgatatttcaagatttgccaaagtcatcttccaccttgttttctaactgaatacttgatcttcaacttcatccttcaacaaggaatttatactgcatagtttcttaaagttcctcaaatagggtagaaatctagatatatttcccacaagtcacatatctctccttctcctccatcctactcaaactgccttcctaatagaggataatgtaattgagcctctggttagaagagcagaaattcagcaccaaataaggtaggcaacaacattttttaatattttgtttctcagataaatgtttgtcttttcatcatttgaaaattaagaagatttacatttcatttcacaagacatcattacatatatttatggtgcagtcattctcacctatttcgcttattccctgtggcttcatgatgtatttctatacagccatgagctggacattgaattatagcattgcttttccatttatattacactgtagaaatatattttcccacattgttatgatgacttatttctccttgttatcatttttttcacctaactcctaaattatctatcatctgctataaattctaggtgttaaaaatgatcctaaggctactctttaatttttttctgtctatgaaaataaatacatcaggatgatgctgttaccagaatttacataaaattggaaatgttaattgatttgaaataaaataattaggtttacctcttggttctgccacttgttaacttctcatgtgacctaacctgtctctcagccaatttccacttcataaagataataatcaatttcatttacgaaggatactcacaacgcttttttgaagtctactcattttttttactggaatagctatgtctacggtgaaaagtctctgtaagttttggataggataacacaataccaggacagcccctggcgcatagtggaaccatgacatttgctatatcagctcttacgtctgctttctcttctctagtttacttcctgcagaatccaacaaataatctctttcttttaggttttccttttgaatgactatcactcaacataactgacaagtaacagtgaacatttggtaccatttccaaaacagcaaccatgtttacctttcctgccgagcagcctgggggaaaagcctcaggatctctgcatggaggggctccacttgtgccaggttcttcaccttcatctccagcaggtaatctttgccaaatttgcttttcaggtgttggatggaaccgatacatctggaggatgaggtcatatgagaaaggagaaaaaaaaaaccattcagtatgttgtttgagaaacttgatttgctgctagcattgtctcaaggtccctattgttagacctgggcacagtcatttcagctgttttcagtgatctctccctgccacagacaaaaatttccagcaatgcaccttgggctcaagtgtgggtccaggacaggcactcacctcaacctcccagataccatgatggccactcggtcacacacggcctcagcctctgccatgtagtgggtggttaggagggcacccctttccgtgtttctaaaggtggcccggatggcctgcctataatgtcaagagattatttgcaatttaggaaatcctctaattaatcagaaagagatagagaaaagaatttttaactggcatgcgtgtgaataattagcaaaaagagattaagtaaaagagggttcttaatagggcaggtaggatgaggaaggacaagctaggtgagagctgttaaactggaatcatgcattggaagaggggcgtttacagaacacaacattcattatagggttgtgttcaaagagaagtgctaagcaagagaggcttgtttgtgagaagtctgtgtgaaggggaacagaatgacataaaatttaacaacagcgtctcacaacctagtgagaagaaaataaaatgtacagtaaacacgtacaatgacaaccatgtttacaccttaatgagaactactgttctcatgctaagtatggaacactacgtgattgtgatctagaaatgcacctaaaagatcagctgagcgcttatgaaactcaagagtgagacctatgggccctaacaatggtaattctttcttcaataagaaatggttgtaaaatatcatcagggaaagatcttttttttttgcaaagtattggttttacaagtgacattgatagtttttttgttctccacaaaagagtttaagggacaatttttacagaagaaaaatggttcacaggctccatgcaagtcatccgtgctgtccctgaccgtggtaatgttcctcaccacatttgctgctgcccctcggggtccatcccggtcgacggctcatccagaagcaccactgacgggttccccagtatgctcaggacaaagcacagctgcaacgggaggaacagcccatctggttcccatctatggcacttgcagagcaacaccaagccctgcccgtacctttctctttattccctctgacaaggtcttcacgggagacttcagctggtcctgcagcttgagcgcatccactaacctgaaggaaacaggagagtcgtacagtcttcttgacaagaggaaatagataagaggataacccaagcaagggtggagaagcagaactcaaaaatgcagttctggaaatacatgtggtcggggggcagggaaggaggggtgatattactggctgacttgctcccctacaaaagataatattgctttttgaagaaatagaaggacatgacatgatatccaaatagttgttctatgacagtccaaattttagtattttctatacattttagcaatgaataattactttttaaattttaaattttattattattatttttttgagacaaggtctgactctatccccgaggctggagtgcagtggtgtaatcttggctcactgcagcctctgcctcctggctcaagccatcctcccacctcagtttcccaagtagctgggaccacaggtgcgcaccaccatgcccggctaatttttgtatttttgtatttttctttttaatttagagatgaggtttcaccaagttgcctaggctggtctgaaactcacgagctcaagcagtccacctgcctcagcctcccaaagtgctggggttagaggcatgagccactgcgcccagcctttttaaattttcttatttaatatgagaaagaaacttaatactttgatatccaggaaaggagtttctagttgtaaatctacccagtgtgacctgggtcagcatttagagtctcccatcctgaatttcctgtgagggtcatcactctcaacctcctccacccctcccttgggtatagaacagatgtggctcctctgtgtaccgtgtgatggcaacctcagcatcccctttcctcagccctttcacggcggcgtacacctccaggtgctgcctcactgtcaggttgggccacagcgcgttctcctgagggcagtaccccaggaactccagggcatcccctccaccgctccctttcagtagcacctgcagatgaaagttccctctcagaacctaccttctgcactgcttctttgagtatttccatgacatcattctcttcacgaacctagaaaaactagagaaactctaaacctcattgggtttaataatctgtaatcattttgcattggagaaaggttgtcagagagcaaatacaggaaaataagtgtgtccacagccaacaatccaatctcagctgaaaaatccaatatcccataaatgtggtgcctgtccatcctggccaacagtttatatccattttttttaaatcactgtcaaaatgaagcatattgattgaattactatttaacttcgctcatggatcaacatcttttgagtacctcctatgtaacaagtgctgtgttgcctgtgggtacagcggagggtggaataactagtgcttcgttatctggagttttcattctactgaatgaatcaggcaataaacaagtagagaaatgaacatgcagaataaagacagatcaaaagtggtgctgttatggaaattcaggaggctggggtaagaataactggggaagtggcagtaggtagggtaattagaaagagcctgtcttctgagggccatttcaacaaagaggagaagatgctagtcatggaaaaaaaggcaagagcaaggaatctggggcagagcaagagcgagaccaaagccctgtgtggggatgaagcttgatgtggaagcttgacggggaggacaaatatgtggcaagagggacagggaagccagttcctgcagctgcttgcaagacaagcagggatgtgtccttccagccatagagcagcaagcgttcactgaaagtatttaatcaggagaatgcatggattaaaaaaactcacgctggctgatccaattaagcttattttgtgacacccaaatggctggctttctacttcaggtcagacttaccttttacaagatttcattccaatgtattaatgagcagttatctcctttcctcccatgcttaatgagaaataaaatactgactttgggcccaggtggtgactgagttggagggtgtccatgattgaagttaaggactaaattagagttggccaagccaccagcagagaggtaccttcatgaacatctgctctcactgtggctacagagggattgtgaatatcggttttctcttctttcattagtggagtatttgtcaatagcattccaagctgtcttttcctttcttggcttgactactagcccctttcccacggtacagtttcacaggcatctgccttatattctgttctgtacttcccttggacattctttgtaaaagagttcttaaggttttctatcttctgccatagaatttaggagaaaatgttttatctctaccccatgatgtctctcttagataaacctgagctctttttctgtttgcctagccaccttatacaactaaattagaagtacaattaaagtcaatttcacccccttgtatctaatttttgatctatttcttgaaaacactccccaaaaatagttgcatttgcacaaaaatgtatgttccaataactaagcattttgtgaaggacaactgtctaatacagttttttaaaaacagttttatgaaagattaaatattacatactggaaagacaatgctcactgaaagtgcaaatccgtgtgactgatggcagtataaataggatgtgtgtgaattctggcattaatttcagctctgatgctggacattctctcttaatgcctttaataattaccccttgatggtggctgcagcccgtctgcagccatcacagcaaagatgctggctgcagcaagggagacgtcttaatacctttaatagttactccttgatggcagtggcagcctgtctggagccaccacagcaaagatgctggctgtagcaggggaggtgtgactggggctgtgtactccgggggactggcaggggccagaaacaggtaagagccctgcccttcgctgaattggagcatcctttactgaatctcaggggcagttgcatgctccaattttggagcaaagttgtggccaagcccaggtgctgttgcaaccctgctgggtgtgtacgtgcccagggtggaactgccatgccagcctcctgccacctcagctcgctctggattttgggccctgacaagtgtgggagggagtccgggggggtgctgagggcagctcagcatggacttgcaggtgcacctcagcacaaaccacctgggtgccatagatggcatgttgatggcagcaggcagacaggttcctggatagaaaggggtggttctctggtgaaaccccaccttcaagccaccttcaagcttcagggatggcctgaagcctgggtgccaggctgccggttctaggtggagtctgtgacccagagtgagaacttatgatgctttttccaggcctgcccatggccactcatggaccaaatggcacacacttcctcctttctgagcccataaaaatcctggactcagccagattcacacagacttagggactaccagctgcagaaaggagctacccactttgggtctcctctccattaggggctggacactcatcgagatgacctgcctacaaataggagacccactttgggtctcctgagagctattctgtcgctcagtgaagctcctcacctccagttattcacatacctcattcttcctggacatgggacaagagctcaggacctgccaaatggtgggactaaaaaagctgtaacacaaacagggctgaaacatgccccccacttgccatgttgcaggcaatgagaagcagagaagagctgcagcccttcggggatcccagacttaggggatccccgagccagggctgtgacatcctttttagggctctgtggtttctggcacctccaagcttctgggtgccaccacattttttggtgcctgcagtggaagccgcttgcagtatgcaagcatggaggtggcgcctgtgccagtgcctggagcagcctgccccaccacaaccagcatgcctggctgtgtgcagcagccagaccccatgcttgctcacacacccatcaccgctatgcacctggctcattcttggcaggcttgggatccaggctggtggcatgaacagagtgcagcctgctgagctgagtggacagaatgagcccagcgggtctgagccaaacttgggcaaaggcgccaccagctccagaggttttgactggaaaagcgacaccctaaggattctgtgacaacctttcagtgcttagcttttgtgtgcatttatgtgataattcgtgaatttattctcttgggtagttcattaatcacttcagttatataaggattaagtggaatctgttgtttttaaggtcatcaaatcttatcaatctatttcaccattagataacatattttccacataattcacctacttgtccagcagttggttttgtgtctccagttatcaccttaatggatgtgcttttaccagctccattgtgtcctaataatcctaaaacttcacctgaaaaaaaggttacacttaatattaatctattttaatggtaacattaagagtaaaacatagttgaaatctcactatgtgacaagcatttgctattagttgtcatttaattgtcacaaccaccctgagaagttgttattttagccccttcttatgtagttggggcagaagctctcaatgatggggttacctgtgcaaagtcacactgatggaaagtggcaaaaccactcttggaagccaagtgtttcagattctgtctcctgtgatcctaaccttggtgcaataatggcacaaactgaggtcatctaacacttgctggccaagccttcagagtgtgctagcacatcttggttctcttgtgaaaaacaatgaactttaggaaatcaattgtgttcatttaatagaaatgttattacttcaaaagttcatcttattagagagcttatggtttagttgtagatgtgactaggctcctctttgtgaggtgagttaatttaagttagaaatgaaacatacaaaggaagctgtcattgtcattctcctctgggtctgcatgtgaaccaagaggtggtttccagaataatgctcattaggaaccaggaacctctgaggagggctctgagccagaagtggaagatccctatggccaaccttttctaacacagaaggagacatttctcgtggctatcttattcttcctcttggaaaaacagcctttcctcttccctgcatactccttgcgtagacagctggcaatgatgactggcttctgtaaatgacaagaagttattatgtcagaccttaattctctccattagctttgaaacaaaattccatcttcccattggctggaccctttgttgccccagccatgcatcaaagaagaccttctatttggtgacatgctccttggccatgccctatcctaacacttgcttttggagaggagagactcattttcctctcctacaaaggcagttttttcaggagcacagtattttatacagcttgcctgtcctttcagatcaaacgggggcaatgaaacttagagaagcactgattatcctcaaacaacaaaacaaatgctgtgggctggacctgaccctgaatttgtactgtgcactttctccaacaagcaatgatgtctgctgcttagctcagattctgaaattctttcttggctttaataatttctattgcactctatttttaatttattctaagaacaaaagagttaacatgacttttagtcgctcatttaatcgtaaaaatggcaattacctactaaaatagtgatcctcatttgtaaggaacagagaaactcaaaatcattagagaattagactggtagactgactaataaaaaaacctttgtgttatgttttacctcatcaaaattagtagaattcaaggcatttgctgttctcactctttccatctgaacatcttcatcctctccttctggttcttctggattttgacacacatcactacttcttggagaaattctagagtcaaaaccatccattaatattgatttctggctttcatctttgtatcaaaagttgcattatttaaagcatatgtttgagtagtacgagcaattaacaaaccatcataatctcccttcacaactctcatccccttaaaacctccttgcttatcttatctatagaaatatgtttttttcaatatcaacttgaaacctaatagctgacgaagaatttttatatcatagctcaatgaagtaatttttctgggaaccctggctttgacaccaccatgttgacatcattatgttttcatggggaaaatgggccagaatatttgtaatcaggagtttctagcaaaatacaagttagatgcttgatctctcatttcttcagaatatgtggcatattgacttttcctctccattctaagtctgataatatccaggatatacttattctagtctctcttcccttgagtgcctccttcatactgatctcagaagatttattaaaggtctgctttcatcttggcagtctcccatccaactttctgtaatagcaaaagatgaaactgatgtggtttgggagacacagagggagcaagatgcttatggtcactcttctttgtatggtgccgaaaatagtctcagcttttaagtcccattaataactgaaccagtctgtgatccactggctgggatgctcactaccaggaaaagaacacagctattgctgtccttggccagtggatcattctgttccttcctcctggatgaatggcatttattcaactggcaatatattgtttgttagatgggacctgccacatttaactttccccagtgctccactgtggatagtgtcagatagagccttaatactccatgtttcaggtccgtttcttccactagatcataatcttcttgggtttaggtatctggatctgtattatttgtatgggcacatggttcctactccagcctatcctagcacaacggcacctctttgttaatgaattgatttatgcatgaaaaatattttacgatattgatcaacaaaataaaaatctgatgtgttttttccaacctaaagaaaggatcctttctcattgatttctttccaaacttccattccagacatcgaagagtaaaaagaaaaatgataaaatgaaggaaaggctaggaataaagagagatgcacaattagaaacataaaaagataattgttcaatatcaaagatatactaataataaccgaacttctaaaaaaatacattcagtgaaataattacaaactcctaataacctatccagcaaattgtgaaactatcaagttcattttcaatcttttttatagaaacgtaggaaacaactatagttatgtgatattattactttctcatttcctctaacagttgtacagagtccttaaaatttgggaggcacattacctggtcatttgatctttgtaaaaataattcttccggattttacaagcattatatctccttgggctatagatacctgtatctctaacttaataaaagaagtttcacagtgtgtacagaactgaaaattattaaatttagtaaaaagtgataatttttaaagaacagtgtgttcttacaattaggaataccagaaatggctgtacatccattcgttcttcagaaaagagagaagaaaagagaagctgcaaaagaaaagacaattgctaaacagggagttttttgtttcctgaattttgtccacatatacgtgaattggccctaaacagccctgctaacatttgaccatgaatatcacctaagtgtcctttctaaagtgtatagcaaggggctgtcttccttcctcccaaggtctatgagcttttgtttgaagcaataggatttatcaattactaatcacctggcgagagaatcctggagatccgtgctaacctccccaaacagtgagagacagtgtttattcttctcacacagaacttcacataccttcctgtgcccatcgtttctctttgtggggccccttctcttcctttccccttcccatagatacctcttcactcatgtacagtaacttccttccttttgcataggtataggtatcagtcagccagaaaaaaggactttgcttatcttgggtgcttctttagaactctgaaatcccaaagattagggacatttcatttgcttccttctaaagccgagcatatcaaggaggaaataaggccccacatgagtataaggactactctgtttcccactaccccttacccttccttcccatatattaatcaggaccaaattttccattaccagtcagctggaacatattgttttatctgggagaaaatcaattggattccgtcaggcagaaatctttgaaccccatgcactttaaacatgttgtagtagaccttcaacattgggcaaagcttcacaattggtcatgagtttcaagggactgggacagactgtgtcattacttacatgagaagataagaacaaacagccaatcattgtggcaggtggtattaaaaaagtgaagataaatggaatatcactttcgaagatactgaacgcaaatccagccacagagaatacagtgacctaaaagaagcaaatatgaaggttaatcactctgaatttcaatgtaagttccaaatcgagatggctcatcttgaagatattactaatttcaactccaatcttgcaaaccaagctgaaatcagtatatctccattaacagtttattttagtgacttagccaaattcctttggcctagagtttcacaaatgaggtatcacttgataaatctaggatgtgatatgcagaatttttttctctctttttttttttgagatggagtcttgctctgttgcccaggtagaagtgcagtagcgtgatcatggctcactgcagcctcaaactcctgggctcaagtgatcttcctccctcagactcccggatagctgggactacaggtgcatgccaacatgcccagctaatatttttgtatttttagtagagatggggtttcaccatgttgctcaggctggccttgaattcttgggctcaagtgatccactgacctaggccttccaaagtgctagggttacaggtataagacacacccagcacccatagatataatattttaattacagtaaataaactttaaaaaataaaagtagatgatcaaaaatcaaagaaaacattgaaattgatatctaacaggaataaaacaacaaaaatgaaaggtaggacttttggtaactataccaatggggaaatagaagcatttaacaacatggaatggcttaagcagaagtactaaaatacaaaattagggataacagaaagtgataggtacactggaagccctcatattttaccttctaatacactgtaatgactacttaaaagttgttgtacttctaatttctctgtcttccaaaccatcatttttatggctatcaaagtattcttcctgcaagtttatctctaatcctatttctgttctgctctgtaagcttttaaatccttgagaacatcatttaagggccgccatgattttattttttgccatacctaggaccatggccattgtgcaccttgttttttgtctatatctaggagagattattaccagttcctaggatcagcttgggcttttcctctgctaggtttctgttcgttatctctatttgtacctcatacttctcttggctgaaatcttactctttttcagatttcatcttttaaaagaaatctctgctttcattttcacaaatgaatctctcccttatctgtttttcatggacctctttattattcagttgtataatagactcttaagatggaaaataactcgtgactattttaacaagtggttgcttactcatctgtttatcttttgagagccctttcaggattgaaactgtccatttaatctccttcctcccattatcaatcttaacttggacacactgcagaagtcaacaattatttattgaattaataacttaccttttggcatcctgaaatcataggaaattagaatagacactcttaaattatacacgtttcctcctaatttagacaaaagaagagaggctttatggaattaattcttattagggactttggtgaagtaatttctagttttgaccatgtcagtaactgaatttgtaatcttgtgtttattatagaccataatattatcatcctacagagggcaaaatttaaaggattagctcagaattgtatatcaaatatatacagtatacatccacaagaaatatacttacaacatagaaacaaaatgaccaaatgccactattttttctccccttgcgaaagatgaaggaaatcacgtatgtcatgaagatgagggaaaaggaataaccaacagcacatgggatctaaaatcaacaggaatgtgaagcttagttaaatacaaatgcaatcaaggaaaatatttaggattcaaaacattgtcatagcccaggattttatagttctttaatttatgaccatataaatattgatagaaatgttccaaaatttcaaattaaatcacacaatgatattgtgaatattgtcacttacttggatattgtcacttacttgaataatatgaattattgtaagtagcatgtcttcgaagtttgaaatgtagctcattaaatatataaaaacgaagaccaagaagtacagggaaacatccaccagcgcctgcccaaaccagtaagcagaaggggagagtccggaaatccgtagctgggaccgagctctgttctaattaggagacagcaaagatacaaagtttgtggcttaagaatatgtggattatgcaaggaactattcaaacaaaacctttatttgtaacaattctagattatgtctacaaatgtaatctggactaagggatgtggatagttacaaacataaataaccagtctgctgctttaatgaactacattgatgttcatcacacacctggcagaaatatgtaaaagaagaccttagaatgatcaaagcatgaacactgcagcaaacaaaacagtgatttaatgacttacaggtgggtaggggtgaatgggatggacagtttattcccttaaacaactaccttctcatcacagtgattcctctctctcttttctctcctccatatatatatatatatatatatatatccatatatatatatatattatatatggatatatatattatatatatggatatatatacacacacatatatatggatatatacacacacacacatatatatggatatatatatggagtgtgtatatatgtgtgtttattttatatacacacatatatacacactccatatatatacacacacatacacacacacacacacatatataattgctttatcctttaattggaataaaagaaattgtgttgttctgccatagtccacattcaagtatttatcactgattcaaatatttatgtgtatctacataaatataaatacatttacaaatgtaaatgtattttacattatttgtcattccctaaataaacataccaaattacatgttttaaaactacttatgaagtgatgtggttttcagtataatcaataggtttgtatattaaactattctaagagttgtgaatttttttcttttaaaaaatacttaaattcatttgttgatgggctttgatgagctaaataatgctcctgcctgagacataatttgacctaaagattcatatcagagcctcacaacatcagacacaggtctatgcaggtagttgaattggtaaggaattgatgattgactcaacatattagaggcaagagaagaattgaggataatttttggatctttaggaaatgactgagcatgtggtgctgctatatatggagaaaatagcaaggggggaagacatttaagtatctctacattcagttcagttttggaagcatgaaacttgagacatctgtgttgcctactgtggaaatgctgagaagggagtttgtatcaaccttggaggtcaaattagatacaattagagatctggggtagagtcagatctaggagtgaccagccagtagaggggattcgaagccatagagctagatgggtttgcctaagacagaatggtatctaacatgagaagacagccaagggccaatatctgaggatttccaaaatttaaatattacatagaggaatgagaatctccaaaggagacaaacaatggacagtcttaggataaacatggtgaaattgtggcatcacaaaagccaaagaaagtgttcatgtttcctgcggaggaagttttaaagtttggattatgttaacaccagaaagacttatagttacatcaaactagtaaatggaatttcttgagattcctgcatgttccacatgaaaagggaacattacataaaccatacactctttttgtgggcaacagagagagagaaaaaacgaaacagatgaagatgacatagtagagatgcttacacaaggtttcatagactttttccataaagtcacaaaaatgggagttggcctgggttattaatcatataaattcaccgcctaagattgccactcaaaatctggctccactgcagaactgctgaatcggaatcatcttttaaacaagatgctcaggtgatttgtaaacacattatagattcgtttggattaatgagtgtctgtaaataaacatttgtaagttgtcagttcaatattgaagttttctctttatcttttcaagttctcgcatttccaaaaatatcatttccttttatttcaacaatctctttttaattttggggggtataattctcaaacaagaaaaagtacccatactaagtatatagctgaatgaggtctgatgaatgcatgtttctgtaccacaatcataggcaaggtgtagaacaacccctgaagtttcccatgatcctttgcagtcaatagcctttaccactggttacaagtgaccccccacaccccgagcctgccttctgtcactatagattaattttacctttctaagaattttatataaattaaatcatcctaattaaaggtacctaattatttgtggttatcattccctcagtgtaatggttctgagactcacctgtgttggtgcatttattagttgttccttctgttatactgctgaatagtattccattgtatggctatatcagaatttgtttatcagttcactgcttgggggacacttgggttgtttcaagttgttggctgttatgattaatgctattcagaacattaatgctcaagtgtttatgtggaaagatgttttttcttcttttgagtaaatacttaggagaagaattgctaggttataacaataagcatatttttaactttataagaaacagccaaattattttgcgaagtgattgtacaatttacaatcccacccacaatgcatgagagttccggtttctccacatcctcataaactcttgatagtgttggtcattctaacattattagttttattgagtgtgtagagctatctcactgaggctatcttcctgattgctcatgacattaaccatcttttcatgggagtattttccatctgtacatcttctttggtaaagtatatatacaaatactttgtccatttaaaaaattaggttatcctctattacagaggaatgagagttctttacatatttttgatacaaatctttgtcacatatataagtatagttaatatttttctcccagcctgtggcttgccttttattttatttttaaattatttaattaatttattttttgagatggagtctcggtctgttgcccaggctggagtgcagtggcgcaatctcagctcactgcaacctccgcagtccaggttcaagcgattctcctgcctcagcctcctgagtagctgagatcacaggcatgcaccaccacacccagctaatttttgtatttttagtagagacaggtttttgccatgttggccaggctggtgtcaaactcctgatctcaggtgatccgcccacctcggtttcccaaagtgctgagattacaggcgtgagccaccaagctcggctgccttttattttttattcgtgttttacaaagagcagaagcttttaactttgatgaagttcaagttatcttttttaaaatagcatatgcttcttcttccccatctgaaaaatattgcctatcacaagatctgtgattcattacaaattaattttgtgcatgtgacggatgttaagaacatttttcttttcagaatgataccaacttgttccaccacaatttgttgaaaagtctaatcttacccctatttaagttatttggtaattttattgaaaatcaattgatatatgtgtgggtttatttctgaaatgtctatttcatttaaaatatctacataattattcttaattaatacaacacattcttaattactacaagtttgtagtgagccttgaagtcagaagcatattttccagctttgctttttttttcagagttggtttgtctattctagcttgttggaatatccagataaagttcagaataattctctattacctatttatctatatatttcaacttataaaactttctttcatttttataacttagaatttatgtctgaattggctgttcaattaagcatgtagaaatattcttatgaaaaattgtaaaattaccttctgctttcaattatgcaaaataatggaagttgcaattactcattattaccttataatcatcgatgctgctcatggcaatgtaaggtgggcaactcgatgttaaaaccagccagaacatgatatatgccaggaatccgattggattgtcctgtccattctgaaaaacccaaagaatacaatgaactgaatgaagaaatttaaagttaattttctggaatacatttttaaaattttagactaagtttacataattctgccttaggtcccttttgagattcccagattccttcattatccttccagttttcacacttaacttttggctttctactcaaatttacagataagtgattgaaaagatgaatgcactgataacatttggaaaataataagaacaagatttttctcttttcttgctttatgattctaaaatttattttggtgctaaataatacattataattcacagttgatacattcaatttcttagctgatctttatctcaaatgtgacagcttaactcaaaaaatatccaacattttatgggtacagtgataataagtcagttttttaggtacatcatgagaccagataaatattggttgaggacgcaaaaggagagatgaagtactagaagggagagcaaaatcaccaagaaaatctttgccctagttccatctgttgttactcctgtttgtaaaaatctttaaggataaaagatcacaaactctcttgaaagccagtcccatgttattttcatgattctcatagttgcttctttgattaaacacattactgaagaaagttctaaccagagcctggtggtcttcagcttggtcaccagaaagacacttgctaaccatagatggtaaggttatagcttattgtctggatgcttccagaatgtcctgagtactgggtagggtcaatacttagtggccaatctattgactttgggcaggatacaagcaagttctgaaaatctgggcaactctgactttgcgggcaatgagcaggtaaagtagaatagagaataaaatgagttgctggggatattggttaaagtgactatattgggcacataaatacaaagtcagctgagctggttggtatctaattaatcctagttgaaacaggatatcttgatagatagaagtctgaggcaatttgcccaattattgcatactactctcagaaaccagaaaattaaaaggtcttcacagtcacaaaatgttaatgaagtgaaccatagcatatattccaaaattaattaatacttggtgggtccctaaaatcatttactttaatgattaagtttctcgcacatccttaatgaaaggaagttttacttcctgagtacagtgagatatggtgtgagaaggaaactgaagatcttgctggaccatatgaaaataatactggcagctgggtgcagtgactcacacctgtaatcccaacactttgggaggccaacatcggaagatctcttgagcccaggagttcgaggttacagtgagctatgatcctgccactgcactccggctgggtggcagagcgagaccctgcctctaaaaataaatttaaaagaatgacagatatgtgatccattttatgtatacatgagtatatgattattggccatatatattatcataaaaccctagaatgagatgtagataagttgatgagcctaacactcacttatgtatttaacaattaagttgtttcatgtttatcatgttacaggttttttcctacgtacaaggtatttataaagtgttaaaaatacatgatctatgtgctcaaagaactctctgaaagggagaaatgtatgtattcaataattaaaaaggaatcattacaaacttttagttattctggttctaaacttaaagggctatatacattccgatcacttggacctttgtttaagaatagattccctcctttcaccacccccatgaggaaaagtggtttgattggtctggagtaggccaggggaattaatatttttgacaagaatctgcagtaattctaatgtagatagtctgaaattctagcctgaactttgtcttgaatttcttttgtaaaatttctaaaagtaataataaagccccttccttcatttgttccttcctttgttctttccttccttcattcattcgttcattccttccttccttccttcattctttccttcctttctcctttgtttcatttgttcactattcttgtgctggtcacagtgctgtaagatttcatttttattgcttcatattctctttttttttttttccttttctttttttattatactttaggttttagggtacatgtgcacattgtgcaggttagttacatatgtatacatgtgccatgctggtgcgctgcacccactaactcgtcatctagcattaggtatatctcccaatgctatccctcccccctccccccaccccaccacagtccccagagtgtgatattccctttcctgtgtccatgtgatctcattattctctttgaaaaatgttttgttcattttattttactttaaacaaattgaagctctgaaaacgtattgattttccaaagtcacagaactagaatgagtccaaatgttaatttattatgcagtggtttactcaataaaaacaagattccagcacttaaaagggtgatctgggagattcctgatagaggagagtcaggaattgtaagattatatatatttacctccaaaaatgtacttctttcagttcggatatgtactgatggtttaaccattccaagtagcccattactaacaatgtccataagaactgggaagcaattcaatcttttggcattgcatgctaacgaaaagctgtaattctaaaatataacaagtaggatataagttctcaaatatcttcattttgttctctaaaaaagtcaaaatttgacatgttaaattaagaggttatgtttttcatatggtgttaaataatcacaataaaaagccaaacactgtgtaagtaaaatcaaatactgtataagtaaatcaaaacatgtatatagtaaaactaaatcatgtatctgatatttaggacaccggatgtcttgcttgaggccagaatcatatgttcagtgtttattgtttaagaacaaaacagaagttttggaatacatgtgttataaaatccttgaggggaaacatgaaatgttcgaacttatatatagtcttgatagtaggtattctatagtatgtattttgctaatagtttgtgccagtagacaatgatggatatatgaattgtttatgccagtgaatacaattcactaagtaataaatgaaaacagtatttgcttttcatttttatttcttaagttggaagcctgagtatattgatattatgttagcttttcacatttttcagaaagattattagagacctgcataccttttcattacaacacactgtgatggctccattataagatgggtcatctgtgccatttctagttccaaatgcatccacttctaaagctatgttctggtgctccacagactgtataaagtcatcaatgcttgcccctaaggtgtagttaaagatattaggtatcacaaaactaaaaacattaatgtcaagttgtgtagtcaaattacagttaatgtcattatgtgaagcagtaatatggactgtcaggatattttctacataacatacataacatctattatttctcatggaattccttcatgatatttttatttgcttatgattattattaatgtaaaagatttttttagttccaagtgtctttcaaaatagattttagaatcttgcaatgaatgtccataaccaataaagctttaatgatactgataacttccattgattaaccaccaaatttgctaagtcattttactactgctagattattaattaattttcaaaattttcttgatactggaagacaacatgtagactagcaatgtgaggagctcagtagaccttctccccagaaaaacaatcataacttataaaaattcctaaaaaaccaacaaattaaaatgttttgaaattgttataagagcatacagaaaatgatgacacatttatttaataaaatgtattaaatctcagtaagaacactgagaaattgtggcatttgagccacagcctgatccgtctactccccacttccttcccagatctgtgtaatagaagcttcactctgaaagggtgtgggcaagaacagggatccctattccccaagcccagttcagggctatagtatcttcacgggaggggcttcccatcgacttttctcatttccccacatctgcgttgcagaagatcaataccaggcaagagtggctaagagatctggagttctcttcctccacccattccctaatcctaaggtggaagctctaccctaggaataagaggcccaaaacaccgggacacaatcatccttgtcccatctcacgtgtagggcagagtttccacgacaggagaggcaagctgagaagaccagaggccaccacccctgccaagtaccctgctcacaaatcaggggttccacaccaagagaatcaggcacgatccatgcttccagctctgaagcaatggtgagattcttgtttcaggaacagcggcaagccataagaacagtatgtgctgaaactctccctaaataaactgactttagttggaacagagtttggggaagttcaggcctaagagtgcaccaaaaaccatcaagattttgttggtaagcaattgacaggagattgcaattcccttggttgaaccatacaccagctaaaagtttactagagagagcagcaaaacagagagttaagaagagcccttctgtggagaggacacacctcaataactggcttcaaagacttttcctacaaacaagaccatatttatagtagtgctcccttatccatggtttcactttctgcagttttagttacttttagtccactgcatctctaaaatacaaaatgaaaaattccagaaataaacattgtataagttttaaatcgcatggtattctgagcagatggatgaaatctcgtatcgtccactctgtcctgtgcaggatgtgaatcagccccttgtcttctgtgtccacactgcatatgctacctactcattagttacttagtcgccacctccgttatcagatcgactgtcaagacatcacagtgcttgtgttcagttaaccctgattttacttaatagtggccccaaagcacaagaggagtaatgctggcaatttggatatgtcaaagagaagccatatattgcttcctttaagtggaaaggtgaaagttattgacttaataaggaaacaataaaaaaattgtatgctgaggttgttaagatctactctgagagcaaatctcttctgtaaattgtgaagaagaaaaaagaaactcatgctagtcttgctgttgcacctcaaactgtagaagttatagccatagtgcatgataagtgcttagttaagatggaaaaggcgataaatttgtggataaaaaacatgaacagaaacgtgttcttatggatggccattagtttggtactatctgtggtttcaggcatctgctggggatcttgtaatgtttcagatgagagggaattactgtaattggatcaaactgtggagcaacttatgcatatgggcatttttgaaaacaataggccaatcagcttgctactggtggtgcctaacaactgaatgtgataccagtagagttagccagtgtaatggagaggtcaggaaaagagacaaagaaaggtctgctaaatctattgccatctcaggggaataatgcacatggccaaagttatgcctctgaagaatggcatcagagttgtataaagcaggggaaatgagtaaacaataatcacaagcttcaagacaagctgggggtcattattcaaagttgttacaatctattactttaaatgtccagttttcaaccaaaattatgagacatgctaaaaaataagaaagtgtcactcttatacaggaagaaaagtaggcaacaagaactgcctttggaaggctgagatagcaaacctaaaaaacaaagacttcaaggcaggtattgtaagtatgctcaaaaaactaaaagaaagcatgtttagagaagtgaagaaaggtatgatgacaatgtctcaccaaacagattataccaataaaaagttatttcaagtaataaagaaccaaatagaaattctggagttgaaagtacaataattgaaatgaaaaattcactgaaggagctcaacagtagatttgaatgatcagcagaaagaattagcagacctgaagatatattaaatgggattatgcaacctgaagaacaacaacaataaaaaaacagaacctcagaaaaatgtgggacattattaatcacattatttcatatgcaatggaagttacagaaggagaggagagagataaaagaagagaaaaacaaccactgaagaaataatgactgaaaacttaccaaatttaattaaaaactttatacatccaagaagttcaaccaactccacgtgggatgtatgcaaagagatccaaacccagacacatcagagtaaaaatggtgaggacaaaggcaaagagaatgtttccttggtgatgtgtaaggaaacaccaataagaacccagctgatttctcatcagaaacaaaggaagccagaacacagtaaaatgacatattcaaagtactgaaaaaaattcagccaagtattttatatttagcaaaactagctttcaaagatgaaggtggtaataggtatgatgtacactgtttgagtgatggttacaccaaaagcccagacttcaccactacacaatatatccatgtagcaaaactgtacttttatcctgtaaatctataaaaataaaaataataaagaataaaaaatgatgaaggtagaatagaacttttttccaagataaacaaaaatgaagaatttgttatagcagacttgccttataagaaatacttaaaactgaaagcaaataaccccagatggcaatttgaatccaagtgaaaaggccaaagaggatcagcaaacacaactatgtacttataattggtagtataatgcgtatttttccctctcttgtattaactcattttaaaagcaaatgtataatgcagtatgtatataattttattgttgaggcgtaaaacatagacatgtaaaatatttgaaaacaatggcacaaaggaggcaggtggaagcctagctgtattggagtaaggacatcacataagatgataatatgaattcacaggaacaaatgaagagaacaagaaatggtaaataaaaatttcaatgagctacagactctttcctctgatatagctgtattcactcttccccattttgatgttattattacacatatcacatctatatgtttttaaaccagcaatacattggtacaattattactcagtatgatttcatatcttttaaagaagctgagagaagaaaggagagtaagtacatatttgtagactttgttacattaatcttaaatctgtgtaaactttaagtagattaaaataagatgtacattctaggcccaaaaacaatcaccaagaacataattcaaaaatataataaaaaatcgttaaaataattaaatcattaaactagaagatattcaatgccaaagaaaacagtaaagaagaaatagaggaacaaaaaagacatgagacattcagaaaacaaacaataaactggcagatacaaatcctacattattagtaaaaatatgatttgtgaataaaataatacactcaaaaggcatagattgttagattgtatttaaaaacactatccaactatatactgtttataggagacacatatcaaattaaatttacaggagacacatattaaatttcattgatacaaattgaaagcagaaggtggaacaatacatcatgcaagataaaaccatgggaaaactggagtggctcttctaatatcagacaaaatagatgaaaacaaaaaatgttactagaaagcataagagacattttctaatgatacaagggtcaaaacagcaggaagttataacatttataaacgtatatacacttaagagagactcgaaatacaaaatagcactgaaaagtgaaatatacaaattttcacccacaacagcagaatgcacattcttctcaagtgcacaaggaacattctccaagatgagctaaaggcaaggacatcaaacaagcctcaacacatccaaaacggttgaaattttataaactatgatctctgaccacaagggatgaatttagaattcaacaacaaaaacttagaaaatcacaaatttttggaaactaaatagtctactcctaaataaccaatgagtcagaaaagaaatcacaagggaaattagaaaatattttgagataaatgaaaattaaaacatgatataccgaaacttatgctatgcagcgaaagcatagcttagagggacgtttatagctgtaaacacctatgttaaataaaagaagaaaaatctcaaaccagtgagtgaaacttctgtgttaagacactgaaaagagaggaacaagctaaacacaaggcaaacagaaagaaatgaaaccaagaatattggtttggaaatgagtgacatagacaatagaaaaacaatagagacagttaagctagaagttggttccttgaaagcatcaacaaaattgaggaacccttagctaggatgaccaagaaaaataaaataacatgaaaattactaagatcaggaacaaaaagagggcatgaataccagtcttacagattaaaaggattaaaatggaatatgtttgtgtaacaacaaattagataatatagtataatggaaaaattcctggaaagacagaaactattaaactgatacaagaagaaatataaaatgtaaggagacctgtaacaattaagagatcaaattgctaattacaaaacttcccataaagaaaatccctcacccagatagctacactagtacatttctacctaataaacaaaaattgtcaatccttcacaaagtctcaaaaaaaaaaaaaaaaaaaaagaagtgcagggaacatttgccaacttattatatgcagcaagtattaccctgatatctaaagacattagcataaaataaaactacagaccaatatcccttatgaatagagatggaaaacattatcaacaaaaccctagaaaatcaaatctgggagaaaatggaaaggattatacaccatgaccaagtatgatttatcctataaatgcaaggttggtttaatgtctgaaaataatatggtataaaacccacatgatcatctcagtagacacagagaaaacatttgacaaatccaacatctgttcataatgacaaccctaaaacaaaaaaaaactagaaaaagacatgtcacagccttcttgcatttagaaacactaaatgacacttcagcagtattctttgtgtcattttaaacagcaaaatcatcacaaaaaaacataaaaatgtgaaaaatgtggcatgaaatagattgcaaaaaggcatttgtttacagtatgagagctaaaacaagaaagcagtgttattttgttcaatctcagttgaaaatgtgtacatcaggtgactaaaaatgttcacttctctgagcatatctgtaaatatcatgaaatgcaacagatatgtaattgggggttaccaataaatttcagtgaataggcaaattcttagatacagaatctgaatatgagcacctactgtatctgataaaagaatttttatcataacacttagaactcaattaaaaatacaatccattttttcaaaagaaaacagacatttctacaaagaaggtgtacaattgacgagttatcacacgaaaagatgctcaacgttactggccattaacaaaatacaaatcaaaatcacaagatactacttgacatacacgatgatgcatgtaatagaaaaaacaaaaaataagtgttggcaagcatacgtagaaactggaatcctcaaaaattgctgatgtgaggccgggcgcggtggctcacgcctgtaatcccaacactttgggaggctgaggcgggcggatcacgaggtcaagagatcaagaccatcctggccaacatggtgaaaccccgtctctaccaaaaatacaaaaaaattagctggctgtggtggcaagctcctgtagtcccagctacttggtaggctgacgcaggagaatcgcttgaatctgggaggcggaggttgcagtgagccgaaattgtgccactggtctccagcctggtgacacagagcgagattccatctcaaaaaaaaaaaaaaaaaccccacaaaaatttctggtgtgaatataaagtggtacagtcactttgaaaaacagtctggcaggtccttcaaagggtaaacatagttaccacgtgacccaacaattctacttttaggattacaccccagagaaatgaaaacatatgttcaaacaaaaacttgtacatgaacatctgtagcagcatttttcgtaatatccaattattgggaaaaaatatatccatctgctgatgaatgataaataaattgtggtataaccatcaataaaatattactcaacaataaaaatgaagtattgatacatagataaatgctacaacatagatcaactttgaaaacatgctaagcgaaagaagtcagtcaccaaataccacatgttgtatgagtccagtgatattacatgttcagagtagacagatcaatagaaacagaatgtaaatttgtgattgctgaggagttgggggagggacgacatgggagtaattgctattcggtatggggtttctttatggggtgatgaaaatattctaaaagggattgtattgatggtttcacagttctgtggatacactgaaaaccatggaattgtgcattttaaatggataaattgtatggcctgtgaagtatatcttaatgaacctgttaaaaatgctattttggtacaaacgctttcatttagcaagatgccaccagatgtttctcctttagaaaatactttacctattcctgcttctttgggggcctgtatttattatctttaagtttcataaattgttttttaacacatgctgaataagtgaaaagctattttctttctcatggttatgttttctaagtactgctctgaacagtaaatgtatttggaaatcaagtatccaccattttacctgttttattgatgatcagtagttgagtgagagggtcatgtggttgttgtccaggagcaaggaaatacaaatgaggagaaagttcccaggtgtaactgttttgatatattttcaccatggtatactccacaagaagagggcaaaatccagccattagaattaatagcctacacaaaagaaaattgccaaaatgaatgcaatgtcatttcctgatctaatactctctgagcagtttataatgtaatgggataaagaaattataaaaattaaacacaattaactgtcacatttcttgagtattttgtccttttactaactccaaattcaagatgttaaaccgtagatttgtcctttgttcatttctcctgttgctttttggccattggatatcccataaaatttcatgcaatatttgtcctttggatgtcaagattctgcctctctcctgtgcttcttccactgtgatgctttccctttctgctgcctaattcatcatatctttgtgtttttttgcttgcctttataccttagatttgctttttaacgcattgacttaaaaagaaaacctatggcaactctgatacttacagtgctaaaagagcttttctttcatgctttaactttaacaagcgaacccttgcaattgcgcagatttgctgtcgccagagagccacaccacctattgtctttctcatcttgttaagtgaagagaggacttgttccatctcaacaagcctttcagtgtcgtcagctttttccgcttgtacttctcccaaaatagcaatgtctgcaaaacataaaataagcaactcatatgtactttattgagcttactatagagattggctctgctaagcatctcatgattagactcttccgcgttactataggtataacgtggttttgctggttactgccttaaaatacagaaatagaagaaatatttatttcttgaacaaaagggatagaaaggagaccttaggtaatttggatacagacaatacattacagaggtcaagataaataggcaaggtcatcacagtggttagaaatgacatggaaagtcagtaaaggaaacaaatatcttacatgttcaatgaagctacaaattgacatgctctgaacagggagtaaactgtaaatggcaagctacaaactgggagttagctataaattgttactgcagagatttcaaaactattcagttttgaatagtttctgagactgcattcatttgtgtgttctctataatctctggatacccaggatgctgtccattgtataatgctaaaataagcctaatatcaaacctcaaaaagcacacacccgtaaatgtataagtacagtgacaggacacaaaacacactgtgaatgaagatataaggatcttaagatagtggtcaaaagtccattaaaaaaattagccgggcgtggtggtgggcacctgtagtcgcagctactcgggaagctgaggcaggagaatggcgtgaacccgggaggcagagcttgcagtgagccgagatcgtgccactgcactccagcctgggtgacagagcgagactccatctcaaaaaaaagaaataataataataataataataataataataataataataataataataattcagggatattctgcttctcgttagttgcaagagactgtcaacctgtcttaccaagggaataaatattagttatttttaatccatcagatgggcgagagcacaaagaaagctaaaaaactaacatgtataaaggaaggaaacatttctagggggagaagattcctgtggaagctttcatctttagggacatggcagaaaaaggaaaaaggagaaaaccaccataggtaggtgaaaagaaagcagcccagatttaaaaattctgtgattatatgtgggctgatataactgactagaatcatggggtacctaagtcacaaaacgagtttacagcatctacgaactttttttcgtggagcctttcctaagtgcataggaacagtacagcagtagctgggggcagatactcagaaaaacggagagagaaacacaagaagctgcatagtgtcttgagcaagacatcatcagggttcatgggtctttccttttgtgtaatacatgagtccactagggtccagtcactgaatgaggagtggagagatgtatactaacaaataaataaacaaaaagtgatgacaggctgaaaatcagtgagattaatcattattgagatatttgatagcagggctatagagaaatatatagaatttttccagtgctataattcaaagtcacgtctaagggaaagacctgattctacctttaaaacattcgaagctgggagtggactgaatctaataaaacctgtgcaaaagcccaggcacttgccaaatacaaattagatcagttctgccatccacatcagtagtctgacagaggaagagtcatgccattttctggccattgtttacctcagtgttcctgttttgttaaagtaacatccatgataaaatacaaatttcaagacatatgaagaagcggggaaatataacccatagggaagaggaaaaaaaatcagagtcagttactgataacggtcatcagtcacacggtccacatgttagaattaaaatacacaagtttaaaaataactatgataaatatgttacaagatctactggaaaatatggacaatattgagagcagatgagaaatagtaaagaactgaaactctaaaaaagaacaaatgaaaatgttagaatgaaaaagtgcagtatcagaaatagagagtttattatgttcggcttcaaaacagtctgaacacaagagaataagttatttgtgaccttgaaaataggtggatagatagtgtccaatttctaacataaagaaaaaaaaaagaaaaacctgacaccagagaatctgatatctgtggaacagtacaatatgtctaattaagactctcttctttattgctggcctacaggaatttaatagtttcattttaaagtattgtttggggttcttaagtgttttagatctgtgggttcatgttttatattaatttatgatttagaataaatgttttatctgaaattgcccttagaagcctagagctaatatgagtgcagtgagccttggatgtagaaaaatggattatttttaactacaaagcaatgttgacagggatgcgtttcatttttacacaagcttgtctaagaagagccttaatcatgaaccccacattttgtaatcacatctttggaacagtgtgttcttgaaatatgtgcttttacataataattttcatgcattttatttacccgattcattaattgtagattttccttctagcttcaggaatacttcattcaaagttgtcatggaaacaccataattctcaattcctaggtcaggatagctatcaagatccttgtaaagttctaaagaatacatatacagcagtgaattaaaacaagaatcacaagtgaactgaagacaatttttcaaactaataagcacaaatctatgaaactatacttgtgatatgtcaaaaacatttgaaaattaacatttcataatagatcatcttattctgcaaattctatatattattttctattttacatcatgtgttacaacccaaatattactttgtcaaacattaatttatattcatttgcatttctattaaagtttaatcttagttttttctgacttccttttaaaatttaattaattgtgagactctgggtttttcaactctaagcctaattaattgaaaagtcttttctagagaacagatataaatgggagccatttatgttctaactgacaaaaggaaaggaattaattttttgagaattaattggatggtgtagaatcttctgtagtttagaaaatatttgttaaagagaagacatagaatataaaccattaaaaaattttctgtttctaacaatggaagaaaaaattcacaagacctaacaggcagagaatgtggaactgaatcagggaattttcctggaattgtgacagtgattattcgctctagcaattttatatctattcattctttagttcgttcaccaaaatatacttacgcatctgtcattgttcatgaagcagtgaacagtgcccctgcctgcatggatttgaattacagtggttaaatcaagcttaaataaaaacctaattctaatactagggtgattacagaagtcctgaggcttccatctggagctcctgcttgggcaaaaggataggttaaaagctttttgtcttgactagaatacctcatacagaaaggtagaaaagaagtaagatttaagctaataatgagtattatgcatcattcttcattccacctaaaacgtctacaaattttctttaaattataattactgttaaaaagtactaatcagaatttgcgtaacactttcctgatgattctaaggaatgcttgtgttgtcaccataaaatgtgtatttgaatgaatgtatatgtctttgttaaccacatatacagcaaggttaattgtttcaaccactaatgtgggcccttatagtgccccattgttaaggaacaagttccctgaacaacaaacatagttagtaaacttttatgcgttagcctgaaaaacccaaagttattgcaaaagtctcaccgagacagatagccacatcacagggctgtttaatgtagtgcataagccagaggttttcaaccatttgggtttgtgtacatttatgaatactagaatattatgttacacactactagggaagaaggactaaaagaagccctctaaaatgcccaggcattacaatacaactattagaatgtaattctatttcccactatacagaaaataattcagttattgtactattcttttgattatgtttcagtacctgagcatactgtaagacattgataaatgttagttgtaatgataataattatgatgatgatgactattattcacatattttatttcacagtgttcatgcacattacctggaaatttatttgttctttctaagggtaatgtataaataagttttccttcgcttttggctgataatttggcatcagggatgtgctgtttaacaagtgatgttatgttttcctcaacacatatttcatttaactgcaagctggcattcagaaaaaaaaaaaaagacatatgttactcgacatagtctccaatagcaagaaaataattaactagtctctataggacaaagaaaatcaattaaaatctaatgccagaaataggtcagacaaacacaaaataagaggacaaaaacccaagaaataagaggacaaaaacccagccaaatcatataaatgtgatggacaaaagaaaagaatgagctaatgagagttactggtgaggttactcaggagtagtgcccagagaagtttcatattgattgaagctcctgaagagagggtggtcacagagtggaaaataccagggttgcagtacagcaaaggtcaggactatgcaaaatggataacgttgcagttgaaggttcagttttaagctgactaaatagaattgttgtatcgcttcaaaggaacaagagacttgtgagaagtatagatgccaaacagtttcagttactcaatgtagtcatccaatgcaaatttactaagttcttagtatgtgacaaacatcatacttagtgttgaggatacaatggtgactaaagcagcattattctgctcttatggagttcattgtctagtgcgggcgtcaggaagaaaacatgtagacaaccagatgagtaaaataattatcaatagtagtaagtgctatgaaggaaactggattatagatagaaactaataatggatgaatgtggtttgcttttcttgtaatgctaagcccagaactttgaataagaacaaagtatcattgagaaaatcagtctatccattgaaaaataccacagctatttctccattatagagaaacagacaaacacaatattctattaattgaggttataaattatacagtgggcaaaatatcagtagtgacttggctttgaaatattgttttagcatctggaacgtgttatttaacttatctaaacagttactttattagaaaactggaataatgattcccagcctctagggttattcgaacaatggaataatagtgaagtttgcacttgacaagcccttaaaaatggtagcaattttatttgaccaaatgcataagtcaaaaattattccactgacacataagtcatgtatgaacttaaaagaatatatgctatttttttagaagtagtgaaatccactggaagagtgaagcaaaaaatgtcgtagctgttttccatgatgctgactcctgaaatgaaaacaatttaagaattattccttggccacttgtaggaacttgtgctgagtgctggggcggaatgaatgagtcatgcagaaagtcattccttgaggaacttgaagcttgaaaggggaggttgtaaaactttttctgtaaaatgtgtactagatagtaaattttctaggctttgtaggctgttagaactctgttgaaactcttccactctgctgttgtaacatggagacagccagagcagtgtgtaaaagaaagggcatgactgggctccaaccaaactgtatttacagaaagaggaagtaggctggatgtggctcatgagctataatttgttggcccttagattagaagaaaataaggcaattgcacaaataggagtccatgaatggactcgcaaattgggcagggatcctgactagcactttttattttgaaaacatgttatgtttccatgcagtgtgccaggcagtctcttatttatttttctataacctttacttgtaagtaggaattgctactctcactttgtaggtggaaacactgactttcagatagtttaattaatttccaagaagagatgcaaacaaagtgctataagaaataaaaaaaaattgggacattacacagaactggaaaaatatctacatgagatatttttcaaataactttctaggacttaaacaagtgcagatgagttaaggaaactgtcatcctattttctttgtattgttgtcatgataggtttgttttctttcttaagtatagatggtataaatttacaaaaacgaccaatcatgtaacaaaaacagtagtttaaaatatggatttgactactagatttagaatttaaaaatattcaggttcaatttctgattccagcacttcttaatctagggagtctgtaatttcatctgtaaaataaaagtaacaacacttctattttaaacaatagaagatttaggaggggaggtagagcaaggtggccagatagaaccctccagaaatcttcccatcccccaggaacaccaaattgaacaactgtccacacaaggaagcaccttcataagaacaaaaaaatcaggtgagcaatgatagtggttttaacatcatataaggaaagaagcactggagaggataggaaagacagtcttgaattgctgacacaacttcccatccttggcagcagctgtgtggcacagagagagaatgttgtatgcttgggggagggagaggacagtcattgtgggactttgcattggaactcagtgttgcctgtcacagtgacaagcaacgtagggcagaattcggccactgcccacagagggagcatttagaccagccttagccagaggggaagcattcatcccactaccatggactaaagtgctctggggatctaaataaacgtaggaccacagggactgaaattcctgggcaagtcctgatgctgttctgggctcaaagccaatggacttggggtgcaaaagacctcgagagacaccagctggagcagccaagggagtgcctgtttcaccccctcccccaacaccagacagtgcagctcgctgttccaggagagactccctccttctgttgaggagaggagagaggagtaaataggattttgttttccaacttgcatacaagctcagccacagcagaataggacaccaggcagagttctgaggaccccattccaggcccttgctcccagatgacatttttagacataccctaggccagaagggcacctgctgccttgaagaaaaagacccagttctggcagaattcatcacctcctgactaaagaacttttgggccttgaataaacaccaggagtagccaggcagtacttgccacaggccttgggtgaggcccagtgctctgctggcttcaggtttgacctagcacattcccagctgtgatggctgtggggagagactttctgcctgaggaaaagagagggaagagtaaaggggactttgtcttgcagcttaggtaccagcttagctacagtggagtagagagcaccaagcggactcctggggtcctggattctaggccttggctcctggatctggacttgccccaggccagaggggagcccattgccctgaagggagctgctacccaggcctggcagcatgtactacaagctgcctgaagtcccttgggccttgagtgaacatcagtggtagccaggcagtactcgctgcaggcctggggcagtggtgactagggggagagactccttctccttgaggagagggaagagtgggaagactttgtcttctggtttgggtgtcagctcagctgcagcagaatacagtgccatgtagattcctaagatttctgactccaggtccttcctcccagaaggcatttctggacccaccctgggccagtgggaagcttgccaccataaagggaaggacacaggcctggctgtatttgccacctgctgcctgaagagcccttgggcttagagtgaacattggcggtagccaggcagtggtcgctgcgggtcttgggaaagacccagtgctgtattggctttagatctgacccagcataatcctagtggtggtggccacaggggtgcttgtgtcacccctctgccagctccagacagctcaatacacacacacacacacacacacacacacacacacactccatttggagaaagataagggaagggaacaagcatctctgcctggtaatccaaagtattctccaagagcaccaaagtggtacgtcgaagagtctgcaagaatcaccatgttactggatttgagggtgccccctagtgctgatacagctgcagtgaccaaagacttagaccataacattctattccctttgaatacttggaaagccttcccaagaaggatgggtacaaacaagcccagactgtgaagactacattaaatacctaactcctcaatgcccagacactgatgaacatccacaagcatcaagactatccaaaaaaacatgacctcaccaaatgactaaataaggtaccagggaccaataccagagtgacaaagatatgtgacttttcagacagataattcaaaatagttgttttgaggaagttcaaataaatttaagataacacagagaagggactcagaatcttatcagataaatttaacaaagagattgaaataatgtttaaaaatcaagcggaaattctggagctaaaatatcaactgacatactgaagaatgtatcaaagtctctcaagcagaagaatcaatgagcttgaagacaggctatttgaaaatactcagaagagacaaaacacaaaagaattgaaaaagaatgaagcatgcctacaagatctaaaaaagagcctccaaaggacaagtataagagtcattggccttaaggaggagataaagaaagagataaagatagaaagtttattcaagggataataacagagaacattccatgcaaatagaaaacagaaaagagcagaaatagatatctttatattagacaaaatgaattccaagacaaaaaccatagaaagagaaaaagaatgtcactatataatgataaaagggtcaattcagcaagaagatataacaattgtaaatatatatgcacccaacactggagcacccagatatgtaatgcaaatgttattaaggctaaagacagagagagagagagagacccaatacaataataatagctggagacttcaacacactactttcagcactggacagatgatccagacagaaaatcaaaaacattggacttaatgtgcactatagatcaaatggacccaataaatatttatagaacattttatgcaatggctgcagaatacacagtcgtctcctcagcacatggatcattctcaaggatacacgatatgctagccacaaaacaagacttaaatttttttttcaaattgaaattataccaaatagcttctctgaccacaatagaataaaactagaaatcaatacaagaggaactttggaaactatacaaacacatggaaattaaataatatgtgttagaatgaccagtgtgtcaaggaagaaattaagaaggaaattgaaaaatttattgaaacaaatgaaaatggaaacacaacatgccaaaacctatggaatacggtggaagcattactaaatggagaatttatagcaataagtgcttacatcaaaaagagaaaaacttcaaacaaacaacctaacgacacttcttaaaaactagagaagcaagagcaaaccaaaaccaaaagtcgtagaataaaagaaataataaacatcagagcagaaataaataaaattgaaatgaaataaacaatacaaaaagttgaaaaatttgaaaagttaaacaaaatggacaaacttttagccagactaaaaaaaagaaaaaaaagagaaagacaaaaataaataaaatcagagataaataggagaaataacaactgatactgcagaaattcaaatgatatttagtggctactatgagcaactgtatgtcaataaattagaaaacctagaagaaatggacaaattcctagacacgtacaatctaccaagattgaaccgtgaagaaatccaaaacctgaacataccaataacaaccaacaagattaaagccataataaaaagtctttcagcagagaattcactgctgaattctaccaaatacttaaagaataactaataccaatcctattcaaaattattctgaaaaatagaggaggagaggatactttgaaactcattctatgaggccagatatgactggaatattgatgtgaaaatcctcatcaaaatactagcaaaccgaattcaacaacacattaaaaaatcattcatcttggtcatggttggatttatcccagagattcaaggatggttcaatgcatggaaatcaatgtgatacatcataccaacagaataaagggcaaaaaagatatgatcacttcaactgatgctgaaaaagcaattgataaaattcaacatctcttcatgataaaaccctcaaaaatctaggtgtagaaggaacatgtctcaacaaaataaaagccatatatggcaaacctacagatagtatcatactcaatgggggaaagccttttttctaagatctggaacacaacaatgatgcccactttcaccattgttattcaacatagtactggaagtcctagctgtggcaatcagataagaggcagaaaaaaatggcatccaaaatggaaaggaagaaataaaatcatccttgtgggcaaatgatatgatcttatatttgaaaaatcctaaaaactacaccaaaatgctattagaactgataaacaaagtcagtaaagttgcaggttacaaaatcaatatacaaaaatcaatagcatttctacatgctaacagcaagcaagctgaaaaagaaatcaagaaagtaatcccattgacaatagctacaaataaaataagatacctagtgataaacttaaccaaagaagtaaaagatctctatagtgaaaaccataaaacattgatgtaagaaattgaagaggacacaaaaaggaaagatattctatgctcatgggttggaagaatcaatattgttaaaatgttcatactacccaaagcaatctacttattcaacacaatcgctatcaaaataccaatgacattcttcacagaataaaaaacaaacaaactaatatttatatggaaccacaaaaggcccagagtagacaaagccattcttagcaaaaagaacaaaactgaaggaatcacatcatcggacttcaaattatactagagttgtaataaccaaaacagcatggtactggcataaaaccagacacatagaccagtggaacagaatagagaatgcagaaataaatccatacatctacagtaaactcattttcaacaaaggaccaggaatatacattggggaaagtctcttcaataaacagtgctaagaaaactggatatccatatgcagaagaatgaacctagactcctatctgtcactgtttacaaatatcaaatccaaatggattaaagacttacttataagtcctcaacctaggaaactactacaagaaaacattggggaaacttcccagggtattggtctgggtaaagatttctctaccccacaagcagaggtgactaaagctaaaatggacaaatgaaattacatcaaattaaaaagcttctgcacaacaaagcaaacaatcaagtaaagagacaactcatagagtaggagaaaatatttgcaaactatccatctaacaagtgattaataatcagactatataaagagctcaaacaacttaataggaaaaaatctaataatccaattcaaaatgggcaaaatatctgaatagatagttcccaaaagaagacatacaaatgacaaacaggcatatgaaaaagggctcaatatcattgatcaccagagaaatgcaaatcaaaactacaatgagacatcatctcaccccagttagaatggcttttatccaaaagacaggcaataacaaatgctggcaaggatgtggagaaaagggaatcatcgtactctgttggtgggaatgtaaattagtacagccactatagacaacgttttcaagttccacaaaaatctaaaaatagagctaccatatgatccagcaatcccactactaggtatataccccaaagaaaggaaatcaatatgtcaaggaaatatctgcactctcgtgtttattgatgcaccattcacgagagccgagatttggaagcaacctaagtgtccatcaacagatgattgggtaaagaaaatgtggtacatacacacaatggagtactattcagccataaaaagaatgagatactgtcatgtgcaacaacatggatggaatggagatcattatattaagtgaaataagctaggcacagaaagacaaacttcatacgttttcattcgtttgtgagagttgaaaattaaaacaattgattttatggagatagtagaaggatggttaccagaggctgagaagggtagtggggtggtggggaaggggggatggttaatgggtacaataatactgttagtagaatgagatctagtatttgatagcacattcttcacagattatattacatgtgaatataattatattatattactgtgacgttcttcacagattttattacatgtacaatatattaatatgactatacagactatattaatattgcaatatattgttgactatagtcaacatatattaaaacagctaaaatagtatataactggaatgtttgtaacacaaagaaatgattaatgcttgaggtgatgaataccccatttatccgatgttattatgtaccgtatgcctgtatcaaaatatctcatgtacccccataaatctatacacctactatataccctttaaaattaaaagttaaaagatagaaggtttaagtaaaataatgttaaatatcttatctgagtcactcagtaaattacagttagaatatgctgctattcaaaataaagataataaaatgaagaggatggatgggaggagaagaacaagaaagaaggggaagatctagaaggagtggaagcaagtagccgacttaagaatatattaacaccctgggaagatgagagatgatgaaggtgtaaaatacaagtgtgtcagttgaaaagattcccttaatacatacctccattaataaaacctgtgttgcagatatatattttttagtcatatttatctaaacttttgttgttatattctcaatatctaaaatctccagatcaatatctcttacatatacatactaactaggtagacacaaatacgtgtacatgtttgtacaaacacctgtgtataataatacaaattcttggccgggcgcggtggctcacgcctataatcccagcactttgggaggccgaggcgggcggatcacgaggtcaggagatcgagaccatcctggccaacacggtgaaaccccgactctaccaaaaacacaaaaaaacttagctgggcgtggtggcgggcccatgtagtcccagctactcgggaggctgaggcaggagaatggagtgaacccaggaggcggagcttgcagtgagccgagatgatcgatactccgtctcaaaaacaaaacaaaacaaaaaataacaataatacaaattcttcttgtgtgttgtaatgttttgcttcaagcatcaagccttacactagatctactcccagccttcttaagtgaccttaccttaagtgatatccaatcccccatttcttctttagaaacaaagaagagcccgcgcactttagcttcccttgggagagaaatactttcctgtctgaaaaagaagaagagcaaagaagaaagtttgttaaaaagtggcccatccatttccaagaaaagacaggtaatcatctatataatcaaactttaattcaggagcttctaaggttttaaatgcaggactcgataaggactcaatgaaatagacacattttaatctcgtttacgtgaattttgcaatccatcccatcagggaggttaaattttgtggatatatgttctaatatagaaaattatcccattatatattttaacagatgaaacattaaaatcatttgaatatttcaagtggatttccctcaattctgagtaaaaggattgatctcttagaaactcaacttcacttattttgcaataagcgagtttcctggcagatcatgcttctatgtgaccaaattatacaaaattctgcaagatacactgaaatggttgcaagaggctttgcgtccagttcaaattaccaccagccattcaatttaccagatacagctagattaccgaattacaaaatataactgttcagagaccaatccatatttttagatctcttaaagtcctcctcaggatacttaacagaaaccagtgattacccgccaggatgtcggcctcatccatgaactgggtactgaagaggatcacgcggtctgttttgcgttctttcagaaggttccatacttggtgtcttgaaaagggatccaatccagcagttggttcatccaacaggaaaatctataaacgaggaaagtatataaggcggttttcctcaaaggtgaagttcttccagaaaacaacgcaaaaaccatattgattatatttaacagagtattacggttaggatttagatactctatttaatgttctattatgaatattttataacacatgtcctttgcgaataaaatatttgaactattaccaaaagttccattttttaaactttgaattcacctgcaaattcaatgtgactcacctgaggatctcctaaaatggcaatcccaaaggttagctttcttttctgtccaccacttaagttttgagcaagaacatcctgaatatttttcatttccaattccagcagaaccctttgtatctaaccaaaagacagtatttatgtcatacaccaaaatttattccttttttaaaaatttataaatacaaggctgtaaagtgtaaatggttaaaagcacaaacactgggtcaggcgcggtggctcatacccatagtctcagcactttgggaggctgaggcgggcagataacgaggtgaggagttcgagaccagcctggccaacatggcgaaaccttgtttctactaaaaatacaaaaattagccaagcctggcggcgtgcctgtaatcccagctactcaggaggctgaggcaggagaatcgcttgaacctgggaggcaaatgttacagtgagccggcatagggccattgcactccggcctgggcgacaagagcaaaactctgtctcaaaaaaaaaaaaaaaaaaaaaaaaagaacaaacactggagccaaactttccgggtttgaatgtcacacacattgactactaagttggtcaagttccttgctctcttgaaccacatgtataaaatagggataataatagcacctatctcatagggttgctatgaggaataaatgatttattagatttaaagttaaggatatgcttggcgcattgtaaattatatgcaatgttagctattgtttaaattggattttcttgtccaacaattgtacaatgatttgcgcacaaataatttaaaattaaaactcagtgcaaatggttttaataatctcattttgaccaacacattaactttaacatatttttgtacctctttatccacttcttgtggcagaatcccttttattttagcaaagagtctgaggttttctcttacagtgaggaagtcaaattgcacattggattgtggacaaactccggtcagcttgctgagattttctaggtcagccatttctgaaagcttattgttatagatggtgactgaacctgtaacaaaggaaaagttaatatcaagataaggcttaagatatttcttaataaaatcgctgttaattaaatgtacgtatgactttatcttgacagtttatacaattcaggcattagaaacttctactttagttgcatagtatattcaaaatatgttctcatctgcagcttttcccatcaaggtgtagtccctttgtctgcccctcacatttagctttgcctatataccctgtagtatcctagcaaatgtgatacaagcagagtctgatgaagagcttccacctagtgatttgtctttgcttgctgctgggatcatggggatcattgggtgaagaatcccagcaggccttctgaaagatatatttccatgtgggaaaagacacgcagctgtcctaactgaagccccagatatgtgagtgaggccatgttaaatcatccagcccctgtcactttggtccagaatagaaaaactgcccagtcaacccacagaatcatgaggagcaataagacatgaaatcaatttaaatgcctatcaaagacagactagataaagaaaatgggggtacatacactccgtggaatattatgcagctataaaaaagaatgagatcatatcttttgtgggaacatgggtggagctagaggctatcatctttagtaaactaatgcaggaacagaaaatgaaataccatatgttctcacttataagagggagctaaatgataagaacttatgaacacaaaaaggcaaatcacagacactggggtctacttgatgggggagggttgcaggagggagaggagcagaaaagataactattgggtactgggcttaatacctgggtcatgtaataatataggcaacaaacccccatgacgtgtttatctatgtaacaaagctttacatgcacccccaaacctaaaataaaaattttaaaaaataaaaaaataaataccttattgcttaacaaaaaaaaaaagagttgacagatagaagctggaatgccaaatagcaactaatgagcatgaaaatagttattatgaaatactcagattccatatgcagtataccaattaaatattacatacttccacagaatattactattaaataaaattccatttttccctaggtatgtgtgtttgtgattaacacttgaaagaatttcatattaacagctgatttatttgtcaattgactttgaaaataaactagtttttaccacaggtgctggagaggatgtggagaaataggaacacttttacactgttggtgggactgtaaacgagttcaaccattgtggaagtcagtgtggcgattcctcagggatctagaactagaaataccatttgacccagccatcccattactgggtatatacccaaaggactataaatcatgctgctataaagacacatgcacacgtatgtttattgtggcactattcacagtagcaaagacttggaaccaagccaaatgtccctcaatgatagactggattaagaaaatgtggcacatatacaccatggaatactatgcagccataaaaaatgatgagttcgtgtcctttgtagggacatggatgaagctggaaaccatcattttcagcaaactattgcaaggacaaaaaaccaaacgccgcatgttctcactcataggtgggaattgaacaatgagaacacttggacacaggaaggggaacatcacacaccagggcctgttgtggggtggggggagtggggagggatagcattaggagatatatctaatgttaaatgacgcgttaatgggtgcagcacaccaacatggcacatgtatacatatgtaactaacctgcacgttgtgcacatgtaccctaaaacttaaagtataatttaaaaaaaaagaaaacaaactagtttgtacctttggtgggaacagacaacccactaagaatgtttagcagtgttgactttccagctccactgtgaccaagtattgcagtgatttggccttcgtaaatgtcaaataccagatctaggaagaaaaaaagaaaggaaagaaagataagataaagggatggaaaacaattaaaaccacaaaaaatattccattatggagccaatgaattgttattaattctcttgaatggttgtcttttctatatataaatatagtgggttgttaaattcaaaataaaacattaaaagttccctctataaacttatttctcaaaatagcttcttttgaaattttgaaattacttagtttaaatgaatgaaacatatctatataataggttgattgacattgcctgcatatggtaggtcaatgttagtatttattaaatggaagaatagattaatagtaagttattacatggctaaaactcctttgaggtaagtgacattttcacacaaaagaaaaacatacagtatctaccaatagcttttggattacagacaaaaaacttgagtttgtagaaaaaaaaacccagaatatccttagactacctcaatattacccagtatagattctaaatacatctatttctaaaacatattcatttttttctaacttttataaagtagaagcaatacattagaaaaaaaagtcttatgcagctcaaataactcttttcaagtctaaaataccaccactaattaatcaccgaaagcaaaactgaattaaaatcaggaaatcaatactaatataacaaatattttctttctctctctctttttttttttttttttttttttttttttttttttttttttttttacctttcaaggcttctattttatcaggctttcctttatattcttttgtaacatttctgattctgaaaaaaagaaaagatacttcaaagtgacaattttcttcagtttgtaatttccagtttggtagacaggattggataaatcttaacttcaggatacatgaagatctgggtcttcactctcacacagtcatagctgtgtgacagaatcagctagaataccgcttgccaaccctgtctgcacattggcgtcatgtgaggagttacatgtgaggagttataagaatttcactgtgattgggacccataagcaaaggttccatagattggggtataagctaatattagtattgagaacgggatcacctctgaactgcaaagctaagaaagcaaggccaagagatgacatggacattcgatacccaaaggctcctgtgaaccactggcacaggttggaaagatctttggccatcctgattcaaggtctcccaaggttcattaagaactacagtaagaaagacaatcaatgtatcataatagcaagagcatggggttcacagtactgcccatctaagcttatcccattacaaccacttagtgctctgttaccttaaccaacgtacttattccagatcagcttcaggtttcacaacctgaaaatttttgcagggctttagggctgtgttggaaggcaagtaaaatatttcatctcgcatgtacagtgcatataagatgatattggttacatggtgatgatggctacagaaaggaatgaaattaacttatgcttagtactattataggtctggaattctaggcgataaatctgcatggttttattctaccaggtaagtatataatccataggccaaatcaaatttatgtttcttattttatcatctactattcataaaatattcagtctctattcatataaagctatttaattagatattattattattattatttttttttttgagagagagtcttgctctatcacccaggctggagtgcagtggcacaatattggctcactgcaacctctgcctcctgagtccaagcgattcttgtgcctcagtcacccaagtagctgggattactgacgtgtagcaccatgcttggctaatttttgtatttttagtagagatggggttttgccatgttgctcaagctggtctcaaactcctgagctgaagtgatccactagcctcagcctcctaaagtgttgggattgcaggtgtgagccaccgctcctggccaaaactgtctcgttaaatattcttattttaaattccattttactctcattccacagcacttataattgggcaaggtgttaaagcgatcaaagaggaacaaaaagaaacacacaagcacctcaaataaagccactgttttgctctgagctgctctgctagagtaaacctagcttagttgtgggacaaataaaaatatggaagataaatatggaacaggttaaaagaacaaaatgaaatgggctccttagaagttcagcaacctgggataatctgagacatttcacaggggactgacacaggctggtcattgatgatgagtatgacttggacagccaaggatcttaaggactttcttcctattttctcatatctagaaataaaagtcaccagcaccaaacaaaatggacattttgttgtcacacagaatgagataggcttaactctgcagggcacctctccctgaattccctttgtatctacctctaggccttttctttgtccttctttcttactctttcatcttcttttaaaggacaaaaaatagaagaaaaataagaagtttaaaaagtggagagaaaaggccaggcgcggtggctcatgcctgtaatcccagcactttgtgaggccaagtgaagttgggtgttaaagaccagcctgaccaacatggagaaaccccgtctctattcaaaacacaaaattagctgggcttggtggtgggtgcctgtaattccaactacttgggaggctgaggcaggagaatcgcttgaacctgggaggtggaagttgcagtgagctgagattgcaccattgcactccagcctgggcaacaagagcaaaattccgtcaaaaaaaaaaaaaagggagatagatgaggtggggacaaagagtgaataactgagacccagaaagcaatgagggtgaagagaaacaagtaaaagactgaatccgggcaagggttttgttgaattatcttagctggtaaaatttaagcttttatttagtgtaaatgtcgacaatgttaggctgtaaggggttggtaaagggatctttctttgaacttgagatggaaagtgacagaagcagcataggtgaggacaggtgggaactgtctacagagcacaaaagggaacactgcttgcctcaggtgctatctcttagcttcctgcctttttgccctgttctccacctgcagccttattacctgatggcttctttcccttggaattctggaggcgcttgttcaaaagagtcatgaaatgaaggatcggcatccatttcatcttcaagggccacgtgatcagtcttttgtgtttgagaccaaaatgaggacttcaggaaaaacaaaggtggacgtcgatgtccatattcatctacatggccagaagacaattaaatattgggtcaatgaccacgttagggagagagagtcacagtaatgtagcacggcaacacagccctttgttgctaaacctgaacatgtggtcaacagcaggtaatgcacgttttgacacatgtagcttcataaggaaaaaaaaataccagatgtctctactataataaatcctatcggaagcaatgaaactgtgatttttaaatatttcaaaaggaatttaaataaatgttttagaatttcttaacctcaagaaagacagattgaattgctaatgtaagatatgcaggcatgctgaattctgtctagaagaccaggtgtcattacataggcaaagaaagaagaaattgagaatgactattggatacctttaaaaaaaatccaaaagaagatagaataggatttaagaaaagtaaatgacacatttgtaagaaagaaaaagaacacgataaaataattaattgaaacttaacacaaaatgaatacttttaaagctattttgtatttctgctttatttcattcccaaaccataattttcctcttaagcaaatttatgatctgctttaaagacatattactcataaacatcttgctggaaatgaatccagctgtattagtattctatgatcacttctgtttttcttcatattaggaaacattatgaaacggaagaatcgtacttcactaatattctgcaactatccccactgtaaggttatgggttttcaaacttctgtgtatttctcacatgttcagtccttcattcatgcaataaatgtcttacactctctgtatacctgccacatggtatgttgttagcacctatctctcccttttgacaaaagaaaaatctagcaaataaaagcatgccaccataactggataccttctgccaccagatttaccatgaaataatgctgtcattttatccagttaatttttctgtcattcttatttattatctttagaagtgttttgaacaaagtcacctctggtcttaagttcaagcttagtgagcagagacaattaggaagaaaatggagcaactcacttatttggatgaaataaattttctagttataataataaaatactatgcttttgaaactggaaaaagcatggatgtgaaagatatttttgtgacataatgttaagtaaaaaataaaatgcagccatgaaaatgtaacaatatgtgatataacttgataaaacatgtacaaagagaatatttaaagtaatatcattagagtatgtttgaaacaaggactaaaaaaagatggaatatatcacatagtgcacaccaaaataaaatttaaattggttagagaaaacaattacctaagaggatactaataagcaattgtaaacacagtgacatctgtttgtggatccactgagaataaacacattggaaaaataaacaaaaatgaaaaataatacaaccaggatgttttaataagtagaaggagaaaaggaagaattagtaagcacaagggtcacacgagtaaatttcctgaactatacacagcatgccagggatatacagtatgatagaaacacaaaaaaaagtcagtgagattttgccataaaaacaaaagtagaacagagaaaatatatttaagtatgtgtcttaaataagcaatgttaacaaggggtagaaagccttaaaatattagtaggcaaaaaagtaatttttctaatcagttatgtaatttttacctctactggaaaaaatcaaatgaaaacataccatattcaaacaattctaattgtgtaataagtgtgctagccaacaatagtggatcctgacatcttttgttctgggttcttttaaaaggaagagacagtaattcttaaaggattgtcttaaaaacaacaaaaacaaaaacaaaacaggatgaatttcctgcctcaagatgtggctgtcttcctgctcaccctttccccttcttccctttccaaaagtgtgtattcattgctttttgaataaagggcccttggcattctgtcttgaataggaaacgcagaagggagaatcagggcctgcctttggttataaaaggagggagaaaaaagtgaagcaagccgggcactgtggctcatgcctgtaatcccagcactttgggaggccgaggcgggtggattacctgagatcaggagttcgagaccagcctgatcaacatggtgaaaccccatcgtctctactaaaaacagaaaaattagccaggcgtgtggcacacatctgtaatcccagctacttgggaggctgaggcaggagaattgcctgagctggagaggcagaggtttcagtgagccgagattgtgccactgcactccagcctggatgacagagtgagagtctgtctcaaaaagaaaaaaaaagaaagtgaagcacacaagtatctagggtgcatgagacactgcagtgggtgcttaaatctcatctgtgaacaaaacgaatccctgcttttgtgtaactcatattcttgtatgttgcaaggtgatacaaatgaaaatttatgatatattggctttcctattgtgaacttctggggagatttttttttaaacgtagatgcattgattaattaaatcagaatctcttcaggttgagctgggcttagacttgctttaaaattcttcacatgattctgttgtccagccggagctcagaaccatcgagctaaacagttagacataagcagctataaatgaccatgattaccagaactgtttaggaactagctttctaagaggtctaaaaaaaaaaataccatatacttaaagtgaagttcaaatgaaggttagtgattctataaacaaaattcaggctttagttctgacaagtcaagtagtgagaaagaaatgaagaaataatttggccagtagcgacgactttgttcctctctttgctgttgatacacaaaatagttcttaaaatataaatagtatatccattaggagatttgttttcagaaataaaactatttaaatgatatatgattttaatcatatcattactcacttggcaaaattttttcaaagtaaatcgccaatgccagatagaggcaagtgtcaaatgccaacatgaaatttgttgctacaatgagatttgagccgtccgatggatgaggaaatgcattagaattcaaatcatagtccaagtgtaaaagctgaaaattaaaaagtaattaattaagggaaattaggtataagatacattttaaacagttaggtttagcatagtaatgaaatgactacttattgcctcatactgagaatagagttatatagggagactgcctcctttatggttctcaaatctatgccttggaaggcatggacatatgagcaactagaatgcaatttagtaattgctatgataaaaatatgttccaaatgaaattgaaacattaggaggaagtagggaagtatgggaagagatgacatttgagatcgaacttagatgaacttttaccaaataggacacagtcaaaaggtgtggtgatccatgtaaattggcggcatgagggagaatttctgggcaaaaggcactgctgtgtttaagtagaaccagaagtgggcttgtctatgatgttcaagttaatgagctctttataattaacaatccttttgttaaacactaaataatggatatttaatggttgacatttccatttagttagagggaaggcaaggggaattcaataagaatcacataaacagaaaagacattttatgaatagaaacataatttactaatgaattttccagatgttttaaatttttaatttaatttgatttaatggtttttaatcacgtattctcttcaattactaggtaaaaacatgaactggaatagttatttataattagatttgccacatgtccatatttaattaatagcctaagaaaatactttatattgcctttaaataattgtatgttgatcctctttttttcactttccaaatgtcttattttgctgggctaaataatttccaagcttttaaaagttctgtctttgcaactttacaacagccttcgctagaattttaagccttacaatgctgagtttgtaaatgattacagcctatggattccagagggacagatgtttcagaaatgccattaatagacattcagatggcatctcacctgggccattccaagcatgaaggcaaagggactaagcaagcttaaaatccactccaaggatgcaggaaggtgtctgtacagtgatgtgaaccccagacacccccaaaagacagtgaggaggaacacgaccaggccggtgaggaaagatttctttaccaagatgctcattaagaaagccaaagctacctaaaatgagagaagatctagttggtttatgtttctctaacattattactagcataataaaatagatatacaaaattatagttattttgtgtatgtaacagttgtatattatagttattttgtatataacatacaaaactatgctctgcaaattgcactaaaaattgacattacaaaacacctcaaatcaaattgtacctgtttatagatttttcacatgcaaacagagtaggtagaaaaaaaaggaggcatacagagtaatcagtcggaaacaaacaatttttaggctataggtggatggaaagatatttaattcactaactcaccaaagataatccatacaggagaaagaggctgaagactaccatgaagccagacaaaatgataaactgggtagatcttataacaagtgccaagaaaagggccataatgaagatgaaaccagcatagagcaaaccccaggagagcctaatgtggaaacaaaatgttattttagtattttatgttcacttgaaaaggaagacctgaaatggattctaagataactcttcattcacttattcatccattcattctctctttcaacatttatttattgggtgttctaagatatataaatacaaggtaaaagttttgggcagaattctttagaattaggaatattctttgggaattaggaattgtttttcctaaaattgatttcagaaatacattcacacacacatgcacattgttctggggggtgggggcggtggggggggaattaggtttccagtgtaatagattttggatcgaacattttatttgctgcattcttgctctgtaaccttgggcaacctctgtaacccctctattattcctttatttctctggacaccaggaataatactaccactgaagactaaataagatgatggctatgtagggcactgtcttaatacagggtagcccctcagtgaacctcagacccttctctcctctctggagtctctccaagttcaggaccatcacaagcttcctcagagacaagaaattcttccttatgtgtaatttggtcatgtcactccttccccaaaagctgttgtcatctttctctggatgtgttcactgaaaagtctacatacttgcctttagttccgttcattgtttttgttaagaaagattttttttgaatcccattcttttatgtcagaataattcactttcctttcctcatcaatttcttttcttttgttttacaatattctttgaaaactataatgaaataataattttaaaaaacaaaaacaaaacagctgcaaagccaacacaataataactcacacacatagcaattaatatgcattgaagaaaacttagcaaacattaaagcattttattctcccaatagccctattcagaataccattattttcctcatcttattgatagagaacctaatgaacaagggtgttatgtaactatgtttcaagttcaggggttttggctctatagtctttagatttcactgctctgctacgtttccctccagtattaattcaaacaagaggtcaatattgatgtataagatgttaatactggaaggaactcttccagactcctaatttgttgccctatgcacagcccatctgcctccctagcctctctgttatttaatgtcctactccctgtaaacatcacctccatgctctttcagtcaattattcataagttctcacacagaaccttgtccattcttggaatcacccaacctctgacattttaaacccacactacccagcccctattcaccatcctgttttgccagctcattccctcaggcacaccaagcatgttcctcagtctcaaaggagttcctggtcctcggcttctttttccctttcaatcccctcctagctcacatctcacctctgtctggcacagacaccattgtctatcttgtttacgcctctcttgccatggccattcctcattacaccttcttcacaatcaaccaataacctaaccccaatcttcttccttaactcagagaagcacagtaagacgcagcctcagcctggcaaacattacaccaatgacagtttataccattcatggggataaaggatttttatatttctttccttgttactaaagaatgtttaaaagtggcattttcttattcatggcaacacatttttttaaatggacattgatgtgtgatagttgtgacattattttttctgtaaaattctgcatttggctccttatttgttttctcaaagtttttttatttactttttatgtttctttaaaagattatcttcctcctttctaaaaaagtcaatattattcgtaatggaagttgtattttcttaaatgttagcacattctgtccccttttatcttatttcctatagcagttccttcacagtacagtgaatctgaaatagatttagataaaattgggtcagagattgttaaatatattaaatgaccagcctctctacttagtcctgtaaaatttccagaagcaaaatacatttcctttttttttttttttttttttttttgtccatcactgcagagcatttctccccactgaaattaactaagtggaaatttgttcatgatctgaaattattctgtgtaggtatctctcatttgtaccccttggttgtggagaaacaggttttaataaagacgcattgaagaggccgggcgtggtggctcgcgcctgtaatcccagcactttgggaggccgaggtgggtggatcacgaggtcaggagatcgagaccatcctggctaacacggtgaaaccccgtctctacagaaaatacaaaaaattatccaggcatggtggtcggcacctgcagtcccagctacttgggaggccgaggcaggagaatggcgtgaacctgtgaggcggagcttgcagtgagctgagatcacgccactgcactccagcctgggcgacagagcgagactccatttcaaaaaaaaaaagatgcattgaagattcccagttttcctgagttcctccgtttatttatttgtgctgcgtttgactcaccagaacgctgaatcccgaagacccatcattgtcatcaaggccttcatccttttcctctctcttgtgacattaacagatgcatagtaaatgaatgaggaaaatgaaataatgcaggaaaaaaggtacaaatcagttataactcctgattgaccaatgaaggaatgcatcttcatattttttccagtaactgacatcagctcctccatcactgagtgatttgttgtgatctgaagaaaggcattaataagcaaaatttgtacgttaatgaacagcatgcagttttcttttaaccatctattttcttgtggatgtatgattggcctattgggatttgatactaacctaaatttccacttctatgtcctgtcattgacctgctgggacctcggagtccaggcattttgagttactcaccactctcagaatttactgtgtgtttcattacctccctgcctaacattactttatgatttgcttggcatggcttttctcaatttatatattcagtaagccacccctcatctcaagcttcaagctggaatgttatttcaattaggcattcttccatggcattctaaggctgagaggtttttactcatttacttatgaggacctgatttatagttctgtaatagtctacttctgttctaataattttcttatattcctggcttcccaacaaagttgagtccatgaatgagatactttttcttctgtttgtatctacattccgtggtatatagtaacttcagtaaacttcagagtgagcaaaggaaataacaaggctatccacttatattttcttccatgaaacttttgatgcctctaatatcattaacttgcattaaacattagtttgctttgaacattttgtactcacttctataatagcagcattaatggcagcttgaagagccacaaaaccttccttccaaaatactgaaacttcacagtaaacatcttcatttgtttcataacaatgagctttgtgaaaaaacaaatcataactatcattacatcactatctatattattgaaatatgattttaatactgattatagcaaacagtggactttacaatgaccccaaattccaaatgttcttattttgactcaaagcttatgaaaacataaattataacaatgattctcaaaatgaatcaggcagaatcatgaggtggagcactcttaggaaatgttttacattaaattataacactctaagctttctcataccgtgtcctgtgcttttctgctgatgaagaattttgttggtctcttctcttttctgatttgtattgtgaaaactacatattttaatgtttttcaaaagttcacagagcctaacatggattgagagacactaaactaaagctttttctaacactggatataacacgggcataataggccaatggaagttcaagtaagattacttactacgcttaaatcatgccaatcagaatatcttttgaagaaaaggatttattcaaaaagagctgtcagtccatttaatagtaaactatattaaagagatatccttgaataagatgaattaaaattgagtataggaattaaatgcatattacatgaaatcatcttgaaatatttcagatatacgaatgatataaaaatacaataaacacgcatggactcactacaaatttgcaaaataaatgcatcatttcaaatacaattagaatctcttgtgcacttccccagcaccaagtttctaactagctaactgctttcctgaacgttatgtatatatatatgccactacatatctctaaactatatatgtaatttaaaaaattaaactctactaataattactatgaactatgttcatttgttccatattatgattttgaaatgtaaataaattgcctcatttaattttttcttcttttttatggttatggaatcccattgcaggaatgtaaatcaatatatttatccattctcctgttgataacaatttggttagttccttttttctttttgtgattaccagaaaaaaaaatctgctgctataaaaatctgtatatatgtcttcttgtaaatatatctgtattggtcaggatagtctcttatatgttacagtaataacccctaaatctcagtgatttatcacagtgaacgtgtatttctcactcaggctacaaattcagcagaggtgtttggtaggagggttgagttgtactgtctgtattatacacaactccttagtttgcagaagcaggtgagaaaagatgaagaacttatacctgcatttaaatgccttgggtctagctatcttattatgactacaaaaagtaattattctatgtcctctggaagaagaggagaataggctgcaaatctttaacacaggtatgagagtttcactaataagatttctatgatgatgagttataagttatgtgcacttcaactttaagataaaatttctcaatttttgtggaatttacaaattttgtaaagttggataggtgttctctttgctacatatccttgtcaatacttcgaattgttctatttgctaatttttgcaaatcttatgaacatgaagtgatataacatgtggtttcaacacgcagtttcctggttgctaatgaggaaaaacacctctcctagtgcttattcttgatctgtgttgttttatgaaattcctattaatgtccttttgttatttttctatttttgatctttttcctatttattcaaagtaaatatttacatattctggaattaattttttgttagatttttctgttataaacactttatcacctttttttttttttttttagagatggagtctcactctgtcactcaggctggcattcagtggagtacagtggtgcaatctcggctcactgcaagctctgcctcccaagttcaagcaattctcctgcctcagcctcctgagtagctgggactacaggcagacgctgccacgcctggctaattgtgtgtgtgtgtgtgtgtgtgtgtgtgtgtttcagtagagacggggtttcaccatgttgcccaggctgatctcgaactcttgagctcaggcaatctgcccggcttggcctcccaaagtgctaggattacagacatgagccaccacgcccggccactttatcacaatttttgcctttatttttcactatctctatggttcttttgataaagggacgttcttaaaatttatgtctagtcaaatttatcaatattttaatttatggctgagtagtattcctatatatatatatatatatatatatatattatcttctttatccagccctctgttgatggacacttatgttaattctctatctttgcttttgtgaatagtgctgcaataaacatatgagtgcaggtatctttttaaatataatgattttttttcctctgggtagatacccagtagtgaagttgctggatcaaatggtagtttgtttttatttctttgagaaatctccatactgttgtccataaaggttgtactaatttacacttctaccaacgatgtataagtgttatcttttcttcgcatctttgcaaacatctgatttttttagactttttactaatagccattccgactagggtaaaatggttatctcctggttttaatttgcattttctgataattagtgatgtggagcatttttttacgttggttggttgcttgtatgtcttcttgtgaaaaaagaagaattcaaacaactcaaataactgcactgaaaaataggcaaatgggttatttgttttgcttgttgagttctttgagttctttgttgaatgcatagtttgcgatttttttttccatctgtaggtcatctgtttactctgttgattgtttcttttgctttgcagaagttttttttagtttaattaagtctcgtttttctatttttgtttttgttgtatttgcttttgagaactaagtcacaaattcttttcctagcccaatgtccagaagaggttattcctagttttttcttcctgaatttttataggttcaggtcctatgtttaggttttaatccatcttgagttaatttttgtatatggtgagagatatgggtccagttctattgttctgcataaggctattcaattttcccagtacaatttattgaaaaggatttttcccccagtgtatatttttgttgactttgtcaaatatcatttgattgtaggtatgtggcttcattctggtttctctattctgttctatttatgtacatgtctatttttataccagtatcatgctgttttagttactatagccttgtagtataatttgaacaactgagcttatttgaagggaaatttgttctatcttatccataaactaccttgttttcttttaacaatcatatattccatataatatctatgtgtgtacatatgaatacatatttcatttacatatataaatatatatctatgtaaatgtatgtagataactatatataatgaccacttatcgatatgttcttatgcccaaaaatgaatttttttttaaatgttgagggacatgcatacatcattatgacagatagtgatgctctaatttggcatactaacctctattcccacacatgacttatgacataattgaaatagagagtagtgaaattttagagccataaaattacctgtatggtccttgtgctccttctttgctggcattccatgtcctagcaagaacttcaaatgatatgagtatgtattagtaaaggtgactcttactatttcttcaggataatttgctgtgaattctttaatactttcctcatctggcagtcccaagacctctttaccttttgttacaagaaggaatattattgttagtaaattactaggagacacaacttcaggatgtcatgttgaattgcttttactagagttttctatggaaataaaacattatcaagtattaacttttagaaagttagactaaaatgttgggtgggagagaaatttctaaagttccatctagatgcaatcagaagaaatacatgaaaattagttattttattttcatatgttgtgattactgagccaatttcaatcacatacaatgtcctactataccaattaaactgttcaaaaatagttatcattcctataaatttgaaatggtaaatatagagagatagatatttaaattgcaattaggcactgttttgtatcaggtggacatacctatacaaatttatttttctttaataatcctgatggtatggttaataagctaaaaaaggtgataaatttaaaaacatgttaagaaactatgttgacatcactgaaagaatccctcttttctgtaggtattttgtctgaggccacatggatgttttattaatactgaaaaatgagacaaaatacaagaaaagttctggattggggtggaagtgttgaagatgaatgtagagggagcaagaagtatgtattttgatagaattaattttattctcaaacttatgtcatcatgagcaaattccttaccctttgttactcaatttctatatttgtaaaataaacttaataaccattattattattattatagaatattaatagagtacagaatatagaataatatcattacaaaatattctctttttacagaatacagtttttgtagaaatataccatattgtagcatttaatgaatatttattattataattgcatgtggttttgaatgaggtaatgtcgagaagcacaagttcctgacattgggtcttgttatggacgtctgtgaaacagcaagagcagacacgtctcagggccgtttaggagactggaccttaggtggatagttcatatcacattataatcttgaatcagaagtggattcagtgttggtaggtaagatgcacaatataggcattaaaatgtatgtggaactaatggtgtgatgcttggtgaggcgccgttggaaagcatattttggataactcacaggaaggaaaagtccaacatactctggaaactctggccatagacagtccaaatagcaagtgcatgaactggattactggatacagaatccagtgaaggggtcagaatccaggcataagattaataattacttaagcttgagtggaatttggacggaagttgacaaagaaaggaaaaaaagaggttatgcaggcttccagtgacttggtggagcaagatgcataggttctccttagaagaacgcccttggtgggagttatgttgcttaaaatgaatagtcagtaccttctaagtcaaatttttatattcctttaaaaattgggatgtaattcacataccataatattcacccttttaataatttcatggtttttagaatactcacacagttgtacaaactcgaagtcactttaaaattataactcaactcataaaaaattattcaactcatcaaattaaatctcactttacatccaaccatcaattctgatttgaagctgctgcctgatactgacatcctgtagatatagtctgactgttcctgtacttctacctccatttgttaatgagaatcttcttttagtattagcgtagttggctttcaatcagttaggtttggtataatccaaaacagaataactaacttcttattaactttattgacaaatacattgctagcattatttttgtagttattctggttataacaactaaatatttatacagaaaaatcatgcccatatgaatgtgggtccgatccaacaggacacaccatttgccattctctacaaaattcttagtagccattacatttttactagctgatctagaaaccatcctcctgttaccattaccatgagcatctcaaatgaacaacttaaaacttatactcactatagcactaattttaatctttaccttagccctcgacccagcctatgaatgaatgacagggcgatcaccacagatttccctttgaagtatgcatttatagttgtaaaggacatatgttgtttttatctgttgacatccagttcttctaataaaaacacactatgatccatttgggatacttcccttcctctgctcacatatcctgtggtttcaatgtggttcatgacctgggaactcaacaagtgggcaatgaaaataccgcatatcccctatccaaagagattagttctcggtgaaccaagatcaacactaacccaaagtcacctatttgttcctgtggataaaatccttgaagttattgtgaactatcagaaatgatctgtaatcttttcactggagttgctaatctgggagggcttaaatctggagagtctgcagaccaactctgcctctgggagaaccaacctgtgaatgaagccagcacacaaagctgtatatcggaggggcagagatttacttctgttggtgataaacctctaatctgccttgcattaatactctgctcttttaagctagacaaaagattctttttcttaagacagattgagttgggcctcttacgctcaactgaaatatttatgaaaaatatagtattattttttatagatcattgttaactagtcaccctactgatctatcgaacacaaggtcttatttcttcaaactgtaagagtttattgttgcataaattgttaatcttattttgcgtttgctaataataaggctaagagaagctgatggctttcaaaatgcactccagacacatatgtatcacagcagttctgagtggactcttagaactacttttaatcaaatgtcctctgactctaagtctagttctcttgcctttgtaccaggctgcatctcctctaatttcagagcattgttgtaaaaatgattgttataaaaatgatctttacccttcagctttaaggtactcgttaagttaaccttaaccttaactcaacttaacaactacttaaccttaactcgttaagtaccttaatgctgaaggatgaaaatctgaaatacagaatactcaaaggaatattcaaatagagcaagcacatgtttttggtgttaaaaggtagggttaaaattcctataatcaaatttaggaaaagaagagactggtttttctttgtctataagaacaagaaaacactacagcaacgatttcattttggtgacaatgctttcagagtcacatgtcaacatatccctaaacactactgctctaaatgtgcaccagtctgtataatttcatgcttcctcaaatcctataccagatcaacaagtttctttttgagagactgcgcaccccaaatggtaaacccttgtttggcaagcaatacatgtagttttaacttagatactgagtggtgagatgttacttccaataaagggaagacacattcccaattcatgtactccagaaagtttaattatcaaactgaaatacaaattaaatgtataaatctgcggtcaaataaaccaaatattcacaccagacattcttcttaagtaactagaaaacttacctgccaggaagggagtagaggctactttattcattatctgttgggtcgtgttggtgacaggtgtgtatacaacagaaaatctggattcattaaatgtatctacccgtcccaggtccatggtaagcagtgaagaaaaatcatttacttgatgactatgaggatatatatacaaacaaagtagtaggagcaatgaattcagccattcctatataatacaggaaaaaagataaagaaaagtcttatttaaaattagtcatccacaatcattttgtcataaagtttgcctcttttttacttttctaacttcaatatatcccatattataaactgtttaaagtctgctgaaagtcaatgtgttttaagagatagttccaaggcattgctagcttagtaatgatatactggttacatgccaagattctggaatttcaaactcaacagtataccagtttgtaagggcattctgataattctaataataagatagtatcggagggatagtatcttcgttagttataaatcctgatcacatgcgaactcccaataagaaatcactttatttccaaaatgcatgatcttaggggaaaaaactttacgatgtatgtatagtggaattccaatttagttaaaaatgctacctagctatatcgatctgatttttaaaatataccaaagtttaatcaagattttttatatggtaagattataagagctaatgctaattttcttcttggaatttaatacaattccaacttttctacttttttgaagaaaactaattgtttcaagaagagaaaaagatctcaaagagaaaatgccagttacccattgtggtgggttggtttgtttaccatatctttggaatgtcagtatcttaaccctagtctccatgactggggacactagtaacaaatgtgaccattggcttttaaaacatgtattgatttctcaattgctaccagattcagtggtttcagacctcaatttatgagcccatgtcaactgaaatatcttcaaacagattcatggcctgaagaatagcgttttctgttgtataaacgttgctgtattttagtgtttttggtgtatgtgtcgggggagatacacatggcatagataactcccaggcaacacgtattttcctatcataaatagagaataacacggatattgagtcataccattaaggactctcttttcattctccattttttaagaaagttcttgcataataaggcccaagtttgttgacacacactgatctttctcttcctcatcttgtcttgtttaatgaaaaagaaagaagataaaattaatatgaagttcttaagaaaaagaaatatcctgcaaacaacaaaaaaacgtagcctaatactccaatgttccaaatgagtgcaaagagtctgagtgttcccaagtcagcattgtattactcccatgctctccttccgtccccacttgcagactctgttccatcatttatttgtgatgccctgtgcctgttatcaatttactgtctctcagccctaaattcactctgcatagcctgctctataaaaatggatctgaatcctttaagtactttcctttgccagctggcatgatgttatgctgtttcagcagagaggacagtagagacactgcaggcatctgatgccatccaggtatcagaatagttcatttgctgagttgctatagaatgtatttttccccactgagtaaattgttttctccaatgcaaagtacctagagtgtgcaggattcactgtgtgtttcctctagctcttgacttgggtagcagtagtatatctgggagccccagatagctacatccctttcctcgaagctctgtttcctttggccgtcctgttgcaaaaggagtgcactctagtactggtgtccacagcttgccattcagacttctttgccattcggtgggtttcaaccacttcttatccaattgtcaataccttatctcctcatgtttattcttctttggatattctccctcagccctaggaagccctcttgagctctcagtccatctttatagttattctcctgtcactattcaatagttctgtatattaaacttacttcatttaattactatgtagtttctgtccccagattgcacccagaccaacacctacacatacaccactcttaatttcaataaatacatccttgaacacccaatttaatgactctataatatttagcttaagaacctgaataaataatctgttttaggaattgatctatctaagacaatttaatgggatctttgttatttctggcagaaataattgctctctttactaatttgttgtgggatgaaagaaaattttctttccctagtgaaagaaattgaactttttactatctttctttgaagaattaaaatcttaatataggataatcaccatagtttggcctggaaaaagctttacattgtctttttaaaatgtcactttaatcgaatgtcattttaaagtgacatttatttattgtttccatctttaagaatttatttatgtttattatgcagagtcatcaggaaaaatacacacacgtatttccatatatatgatctccgtgtatgtgtatagatatacttttttctaaaatcattgtagcaatttgtactatgataggaagtatttcaaaattcatcttttccacattctcatctataaccatattgccattctctataagatttcctggatttttctttcacttacaatgcataaattctcaagagaatgttgctactttcctaataatgaaacaaagtcagataatctataaaattataacttttcttgggtctatcaaagagctgagttcacaggtaactaggtaaactaaagtccaaagggtaaaagccttctccagggataaaagggacccatgaacagtttcagaattggtagagtattagagaaagacatggctactataaaagcaggtagggagaaagcagctgaaatgttaaatttttaatggctgagtgtggacccacagcttgcgtgtttgtttacaattaccaggaccccagcacatttgtcaactctttttttacaggcttcacctagtattcattaaaaaaaattacaatagcaaagagttggaaccaacccaaatccccatcaatgatagactgcataaagaaaaatgtggcatatatacaccatggaatactatgcagccatgaaaaagaatgagatcgtgtcctttgcagggacatggatgaagctggaagccatcatcctcagcaaaataacacaggaacagaaaaccaaacacctcatgttctcgctcataagtgggagttgaacaaggagaacacatggtcacagggaggggaacatcacacactgggtcctgttggggggtgagaggaaagggaagggagagcattaggacaaatacctaatgcatgtggggcttaaaacctagatgatgggttgatgggtgcagcaaaccaccatgacacatgtatatctatgtaacaaacctgcatgttcagcacatgtagcccagaacttaaagttatatatatatatatatatatatatatatatatatatatatatacacatatacatacatatgcaaacaagagacctgaaagacccccagtagctcacaggccacaaaatctacccatgtctcagaacattttttccaaagggcaaatctagaaaccttggtagaaggacaggaatccctgtcagccccacaaaacaagctgttattgcatcttggggaggagttaaagcaaaaatcagcagctaatgaggggcaatctgtaaaccaccaaccaccccttcccccaacctttactcctgttccaagtgaatttctgctgctaagttatgggtagaagcaaaaaaccactttgtggagggagaggaaggaaaccacgtcgctctatgataaaagccttgcacctggtaaaaagcaacagcctgctaccactgcaggtggggcaggaagcttccagttcccattcccaagcaaagataatttgcagctgagatttgcaacaaggacccagcacggatacaaagcagagacaggctctcaccacggcgggggagaggacgctctcacaggtccagaacctctcaacagatacaaggtaggaattggctggtatgtagggagaaaaacatgttgaggaagccccatctcaagggccagatctatagtacctaatactgaggctggagcaggaaatctagagttcctcctgcccatatctcaagcactgcactgagcaaaaagctatggcagtctatggatgggggaagggtaagataatggagggggtctcctttactgcttgggtgcacaaggcctttgaaagttgagggtggaacaggaacacagagaaaacaatttgcagcttctcagagccaaattatttacaaacatggagtgtgtagggtatctcagtattagaatttgtgttgtctgttgtcttgtttttcatagaatttgagcgtcgtcttatatgttgaatggccacttagacttctggaaatagctttttgtactcagttgatttttttttgtcatacctatttgcaggagttcattatgtattttagatatttgtttgctgctagttattaattttgtcaatctctaattttcttctattgtattcaagtttaagttttgttgtggtcaaacaaccttttccttggtgattgtgtatttggtgtgtgtgtcctgtttagaaagcactttccttttcagaagtcataaatgcacattccttcatattcttctaataatctcaagtatttgtcaagagtacatgaaagatgtactctttcatacatctgagtttatttttgtgtaagacctaagagagtgacctaagtcgttggtgatgagtttttttctttctgcatttctcaagcatattgttccaacatgaactactttctggttccttctttccgtattcatttgttattccttctctctcgaatagcagatatgtgtgtgtttgtatttatgtttgtgtgtatatgtgtgtgtgtgcgcatatgtatatatattatgcgtgtatgcactttgaagtattctagttttcaattaatctctttgtatacttctcacacatagtctagttactagcagttactagaacttcataataagccttcataaattctagaacaggttcttcatcttatttatttttttcaaaattgtcttggctcttctgggagcttactatttgtgacagaaactgctagctttttaccaaaattaattaattaattaattaattaattaatttttgagatggagtctcactgtgtggcccaggctagagtgcaggggcgccatcttggctcactgcaatctccgcctcccaggttcaagcgattctcctgcctcagtctcccaagtagcagggactacaggcgcccaccaccatgcccagctaatttttgtatttttagtagagatggggtctcaccatattggccaggctggtctcgaactcctgacctcatgatctgcccacgttggcctcccaaagtgctgggattacaggcgtgagcccccgcacccagccgctttttaccaaaatttattactttttctttctgagcacagagctatactccattcacaatgacataagattgcttcctagtcaatggaatatatgcagaagaaataatgtgccatttctaagtcatgatattaggaagtaggtgagtctctctatatcctcttttcccttctgataggtagatgccttagaagacagccggccaaaagacggatggaattcagtttcctagattatcatgggaagataaactgatatattagtttaatgagcaagaaattatattgtattggccgggcatggtggctcatgcctgtaatcccagcagtttgggaggctgaggcaggcggataacctgagctcaggagtttgataccagcctgcgcaacatggtgaaaccctgtccctactaaaaatacaaaaaaattagctgggcatggtggcatgcaccttcaatccccgccactcacgaggctgaggcaggggaatcgcttgaacccaggaggcagaggttgcagtgagccaagatggcgccactgcactccagcctgggcgacagagtgagactccatcaaaagaaagagagagagagagagagagagacagagagagagaaagaaagaaaataaattgtattgtagttgagccattaaataatttttgttagatttattctacagttcaatttatattagctacttatactcttctaaatgcatattggaaacattttgacaagtttcatgataaataaaggtctgattactattgcattaaatttattgattcattcagatataattaaaatgtttatggtattgagttttcttctacatggacattagatattttcttatgttcttttgtgattatgattatatctaatataatctactaacatgtaaattagattgatgttttctctcatgttttccagcaaatactataatttgtcataaggtatttttaaatactacttaattgaatttgccaatattttacttgggattgtgtataatcataagttacagtgtactataatttaattgtttatacaatgtgcttgtctgcttttagcctcagtgttatgttagctttattatggctagcattttctctttttctgttctccagggcagtttgtaacacatggaagatctgatcttagaaggctagtaaacttgctgataaaaccttatgagcctgttgtttctgggataaggatgggctaaattatcattgctgttaacgaaggttcaattaattaaatatgactggtctattcaagttgtctgtttcaacttgatccaattttgataattttcactgaaaagtattcattatatttagattatttatttatttatttatttttattttacttcatgttctgggatcatgtgcagaatgtgcagttttgttacataggtatacatgtaaccatggtggtttgctgcacctatcaacccgtcatctaggttttaagccccgcacgcattaggtatttgttctaatgcccttcatccccttgccctctacccctcaacaggccctggtgtgcattgttccccttgatgtgtccatgtgttctcattgttcaactcccacttacgagtaagaacatgtggtgtttggttttcttttcctgtgttagtttgctgagaatgatggcttccagcttcatccatgtccctgcaaaggacatgatctcattctttttcatggctgcatagtattccatggtgtatatgtgccacactttctttagccagtctaacattgttgggcatttgggttggttccaagtctttgctattgtaaatagtgctgcaataaacattatgtgtgcaagtgtctttatagtagaatgatttatattcctttgggtatatacccagtaatgggattgctgggtcaaattgtatttctgatcctagatcctgaggaatcgccacactgtcttccacaatggttgaactaatttacactcccactaacagtataaaagtgttcctatttctttacagtcttgtcagcatctattgtttcctgactttttaataatcgccattctgactggcatgaaatgatatctcattgtggttttgatttgcatttctctagtgatcagtggtgatgagttttttttatttgtttgttggccacataaatgtcttcttttgagaagtgtctgttcatattttgtgtccactttttgatgggattgtttttttcttgtaaatttgtttaatttccttgtagattctagacattagccctttgtcagatgggtagattgcaaaaattttctcccattctgtaggttgcctgttcacgctgatgatagtttattttgctgtgcagacgctctttagtttaatgagatcccatttgtcaattttggcttttgttgcaattgcttttggtattttagtcatgaagtctttgcccatgcctatgtcctgaatggtactgcctaggtttttttctagggtttttatggttttgggttttacatttaagtctttaaaacattttgagttaatttttgtataaggtgtaaggaaggggtccagtttcagttttctgcatatgactaaccagctttcccagcaccatttatttaacagggaatcctttccacattgtttgtttttgtcaggtttgtcaaagatcagatggttgtagatgcgtggtgtaatttctgaggtctctgtcctgtttcattggtctatatatctgttttggcaccagtatcatggtgttttggttactgtagcctcctagtgttgtttgaagtcagttagcatggtaaactagaaaatctagaagaaatggataaattccatgacacatacaccctcctaagactaaaccaggaaaaagtcaaatccctgaataggctgataacaagttctgagattgaaggagtaattaatagcttaccaatcaaaaaaagcccaggaccagacagattcacagctgaattctaccagtggtacaagaggagctggtagcattccttctgaaacaattccaaacagtcgaaaaagagggactcctctctaactcacattatgaggccaacatcatcctgctaccaaaacctggcagagacacaacaaaaaaggaaaatttcaggccaatatccctgattaatatcgatgtgaaaatcgtcaataaaatactggcaaaccaaatccagcagcacatcaaaaagcttatccaccatgatcaagtcgcttcatccctgggatgcaaggctatttcaatatatgcaaatcaataaatgtaatccatcacataaacagaaccaatgacaaaaaccacatgattatctcaatagatgcagaaatggcctttcataaaattcaacatcccttcatgttaaaacctctcaataaactaggcattgatggaacatatctcaaaataacaagagctctttactgcagagccatagccaatatcatactgaatgggtaaaagctggaagcattccctttgaaaactggcacaaggcaaggatgccctctctcaccactcctattcaacatagtattggaagttctggccagtgcaatcaggcaagagaaagaaataaaggtattcaaataggaagagaggaagtcaaattgtcactgtttgctgatgacacgattctatatttagaaaaccccatagtctcagccccaaaactccttaagctggtaggcaacttcagcaaagtctcaggatacaaaatcaatgtgcaaaaatcacaagcattcctatacaccaacaatagacaagcaaaaagccgtccactgctcaaggaaataagaaaggacacaaacaaatggaaaaacatttcgtgctcatagataggaagaatcaatatcatgaaaatggccatactgcccgaagtaatttataaattcaatgctattcccatcaagctaccattgactttctttgcagaatagaaaaaaactactttaaattttatgtggaaccaaaaaagagcccgcgtagccaaaacaatcctaagcaaaaagaacaaagctggaggcatcctgctacctggcttcaaactatatttagatttattagcatgaatttaaaatatctataactaaaaatacttttgaaaacctattataaatggatgtatgttttcttctatttttaagcttctttttatttttattcattagtcttgctagaattttgaatgtattaatggccttttaaacaaaacagcagtttactgtttcatcattttcattgcttactatgttttctaatttattaatttatcctcttacttttcacggttttatttctactctttttgggggttggttttgctactttttcctttggcttcttggctgaaataacgaactaatgttagcagagtggctgagaaaatggattctggagttgagtgattgattgcatcagtgacccaattatccatctgtctgtgtccaccctttgtctggtaattttggagtttttgtcatcaaggcaggctagtacttgggccaagagaagaagggaggtgtgatgtcgcaccagttctgaacctcagcctcccgagaccttgagtgtatctgcttgtttttttgtttcttccattgctgtgagagcagacctggcctagcctactgcggaatgaaaccaagctgagtcctctcagtcatccagttgagagtgctagccagtcccctcccagagataccatcaagcctatccaagatcagcagtttcttaggaaccactgcagacaccacactacaaatgcttattgctgtgtgttgttatttgggtttatttcctttttgctatgtaacataaatgtggcaatagaccatacatatgttacttaggattacctctttagcattcactatattgaagtttctttgtttttagtgactttttatttttgatttctaacaattatattgtgaccaaagaaatgacttctcagtaagatactgcttctttaaaattccttaagacttcctcgctggtgcagcatattttaatatttgaaagtgttccacgtgcacctaacatacctgtaactcaccatttaggtgaagtgttttgtacgtatctattcaatctttttcattgtgttcttcaaatcttcagcatcctttctaatgttatatttcctagatcaatcatttcataatagagttcaattaaaaatttccactctaataataggtttggcaatttcttattatatctctgttagttttcagcaagtgcatttaaagcataggtagctaggtgcataaaacattgcttttttatgtttcagtaataggttgcttctatttctgataatatggagacactaggtttctgtaggttaatatttgcctaatgtatctgtttctatctctttgttgttaaccttttgctgcatttttaaatatttggttactatataaaaaactatcaatgcattatgtttagaaatctaaactgatagataactatattttaagagatgcattaaaccatgtatgaatttttgttttggatgatctctcattctatcttattctcacgttaaacctacttttcttttgcttctagttttgtctacatctttaccttctattgaattgaaaatgttttcctctccttcttcacttcttctcctgtcccaaagatgtaaaaggtggttatatgtcttttatggttactcttaaatacttttctaagaaactataacttattttatgaaaactcaaaagtatttattatctctgttctctttttacaaacaaatgccttctagttattttaacactctgctgaattccaatctaattatcctggttatttatttatttatttatttttgagatggagtctcgctctgtcgcccaggctggagtgcagtggtgcgatctcggctcactgcaagctccgcctcctgggttcatgccattctcctgcctcagcctcccgagtagctgggattacaagcgcccgccaccacgcccagctaattttttgtgtttttagtagagatggggtttcaccttgttagctcggatggtctcgatctcctgaccttgtgatccgcctgttgttgtgtagaaatgtgattcaattttcaatttaaagaacatacaaagtagattcattttttaccatcaaatgtctattaactttgccaatgaattatgcatttctgtagcgaggctttgatatacttgggcttgtgcaggaggtggagtgtagaaattcctcctgtacagggcttgcattggcggcagctgctttaagaacccagaaacttttgtcctctctgtaggctagctcactgtgaaaatatcccatggattttacctaaaattgcttacagagagtggcattatacttctatagataactgcatcagtaaccagagaggagaagtacagcagtagactaccctctaccccctggtaggagtagtagcacatcacagtttcagcatgttcaatcttgagcaaagaacatgatgtgattgtttctgggtatgtctgtatatggggggtgattttgtaggggaatttatacatacagtttattgcagcaggcacataaaatacttcccagaagaagataattcagtgcataataagagcaccacatctttccagaacttcaatcaaccactgctacacaaataggatttgctaagccactcctgaaaactgtaggactagagtgctttcaaatggtctttgccgtgggagaaaacaggctacctaagctgaattatagaaagtaaagagattctggaaggtaccatcatcagttttctgggaagcatgtgaaggacatgacttggaagaatgggtccagacttttgagcacaaagccagcagctccaccctgaagaccatcatttggctcataagtcctgacttctgaagcaagtgatctccctccgtatgcatgccatgttggccatgcagtttctatgaactcctccatagtgatgagaagtgaatgagccccaactgaagccatcatctcatttatgggacaggatcacacacagggtggtgctactttctagagccaaatctcaagtaaggtgtccaggggtcagttgcaacagaaggcacattagccacagcagtctcagagaacactgctagaagaagaacctacacatggccatgcaatgaggctgaggggcaggcctaagtggaagcagaccaagtaaagaggtcagagagcccatggaaggagaagagggaaagacagttccaagagtaaagcagcctaggttaaggtgcagaaaattcagcatggatacttttaagagagctgtgcaaggctctccttacctaaaatcacactccgtatacagacatacccacaaacaatcacatcatgttctttgctcaagattgaacttgctgaaactgtgatgtgctactactcctaccgggggtagagggtagtctgctgctgtacttctcctctctggttactgatgcaattatctatagaagtataatgccgctctctgtaagcaattttaggtaaaatccatgggatattttcacagtgagctagcctacagagagggcaaaagtttctgggttcttaaagcagctgccgccaatgcaagctctgtacaggaggaatttcttttttttttttcgttttattattatactttaagttttagggtacatgtacacattgtgcaggttagttacatatgtatacatgtgccacgctggtgcgctgcacccactaactcgtcatctagcattaggtatatctcccaatgctatccctcccccctccccccaccccacaacagtccccagagtgtgatgtttccctacactccacctcatgcacaagcccaaatatatcacagcttctctacagaaatgcataattcactggcgaagttaatagacattggccaagaggatgatctcctcactatggaatcagctacagtcttaggtagcatgcaaactccagtctgactccaatcccttatatcttccatcgtaaagtattattgccaactttgtttctttccaatttttgtatgttctgcagtttatgtaaaggctagcaaaaacatgaatactttattatacatatggcaaatagtctcaaattgtaatgactcatttttatcctcttatactgttgtaaaattcagaacaacatgtattcactataggagtatgaaaattctttttaccaatgtacattttaaataacattgtggtaaagagaagctacatatttcacattctgattcaactcactgtatccaacgagtaaaagatcctagaaagaatcttacatttctaaaattcttatagactaagagtgagcgataggaacaataaaaatatttctgtaagtgctcttggtaaacagtcttaaagtcagaagaacacttatccaaaatgccctacattattgtgcaatcaaagtagataactttaacttcaaaaacaactcagtcttccaacccaattcttaaaactctaagctcttcacaaaaaatttttagccaatttaaacttatttctacactcagttatgtttaaaacaacataatgtttgcataattttttaaaaaacattctaactcaatgtttttatttatctaatattaattaccagatataaaatctttaaagtagcccaatatttttcaaaataatttctgcatagatgattgtcattcagtttataaaggtttatttataattttgtgataggaataagaaaagacaaaacctctgaaacaaactcacacacaaaagcaaaatacaaaacaaaacagaaaaaatacagtgaacttacttctgggaaaatggaagcaaggaatctagaggtatggtttatccactgagctccttgtttagaagaaagttattcatattttctcctggtctctaccatgtatctagaatttgctttaactatttgacttctgtgaaaagtttctgtgaagactgctttcagagtggaggttatgatctcaattctgttggccctgccaaacatcacattcacgtcatcatgcttggactgtttgtcttctcattgatattcggccagttcctgcagagcagtggcatttatactgggttgcctggctatatcatattatagggagcaatttctcttttacgtccaagattattgtggctaataccaaaatttaaagtgctgtctttaagccatgagaaagtaaacagcttaatcagagaaaagctcttctctctacccagagctctagtctgcttaattgacagctttacctagataatcaaaattttcattcctctgcttcccagcttcattttcactcagttcagactattttccaatttatttgacccacggattaatcagaaatgtgcttaatttccaagtgtctgaagattttcttatcttttggttattgatttaattttaaatcagaagttcaattatactcagaaaaaatattttgtatgtcaaatttgttaaggcttatttgatgacccaggatatgatctatcttggcagatattccataggcacttgaaaagttgtatagttttttggtgttgagtggaatattatataatatctattacatttagttggttgatgatattgttcagttttttctatatttttcctaattttctgtctcctagttctgttgattactaagagaggaatgttgaagattttaacaaaacttagggactttcaaatttctccctttaaaactatcatgttttgcctgatgtattttgcaacatttggaattgttatgtcttcttggtgaattgacccttttatcattatgtaatgttaatctttatctctagtaacttttgtgttctaaagtctactttgtttcatattaataatatagccattcttactttcctgtgattattgttttcgtggtattttgttttcatccgtttatttttatctacacacacacacacacacacacacactatatgctttcagagtggcagttatgatctcaattctgttggccctgccaaacatcacattcatattatatgtgtatgcgtgtgtgtgtatgtgtgtgtgtgcgtctgtgtttgttattatttttttaagatgatggtcttgctatgttgccaaggctggacttgaactcctgggttcaagtgatcttcccatctcagactcctgagtagctgaaactacagatacatgccactatacccagctctaaattgtatttcaagtgagtttcttgtagatggcatataatagagtcatgagtttggtttttaaaatccaatttgacaatgcacatcttttaatgggtgtgtttaaattattttcattttatgtagctattgatttttaaaatcagatctgccattttgttatttgcttcttttctctctggttttaattctcctatttcccattttctgctttcttgttggttatttgaaattattttttggtattgcatttcaacgtatctattatgtttcttaactgtatctatttgtatagttattttagtggtcactctcaggattacaaaagacatacttaacttgacatgctttacccagaattaatatttcttcattttaagtgaaatatataaaccttactatgatatacagacaaaataggaaggaggtcaacaagggtgctgctcagtaactatataaccagaaggggaagaaatagaggagtaagaggctcaacatggtctccatcaccccaataaaaagtcatgatctcttgctcagctcctagtcctaagctacttttcagatacagaacatattgattaaaaaactagtcagacccctagaagaaaagatcttgcaacatcttgacaagtatatactgtggtgattatacttcctagtcctccctcaaagggacctaaagccattatttgggtgattatacactgaagaaagaaaaatccccagacatgtcaagggttgttgggcataaagtcagagtggacattgataactgcaacccacactaaggccctacagctagattgagaatatagagccaaggtcgtaaatggagttccggttaacaagcagctctgcctcgtctcactggacttatggacatacccagtggtgattttgctgtcaccaaatgtgctgttagaattgacatatctagtagttagaataacttccatgctgagtccttggcctgtagggtaaaaactatcataatgcagaagggaaagtgggcacctttgacaattctcccaactttatccccagccatgacacttaatcaagaacagtattccacatggggagaagaaatgcagagaccaatgccacaaatagtgacataaggatgaaaggtagtggtgcctagcacaccttaatttaatttgccagcctgatccttgcagaagccagaaagattctagagaatgcttagactatctcaagctcaaacaactagtggtcctaattagagttgctttgtcagacatggtatctattcctagagcagatacatgatttttagccagcgattagtcagatgcattcttctctattctgattagaaaagagcatcaaaaacagtgcacaatcagatagattaggtaatattatttctttacagttttccctcagtgctctattgaccccctagctttttttataatatagtcttaagaggtctggaccatgtagacatccacagaatatcatattgacacattgatggcatcatgctgatcagacaagatgagcaagatgtgactagcatgctggaggttttggtagtacacatgttttagaaagtgggagataaaccctgtgaagattctggaggttttcacttcggcaaaggttttatggatccagtggctaggggtgctttgcctatctccttcaaagtgaaagaaaaattactgtatcttgcagcctcaaccagtaagaagaaaggtcagcatctgtgatgtctctttagattctaatggcaacacattcaatggctggttatatatattatatatatatataattatattatataaatatataatatataatataattatatatataatatatataatatataatataattatatataatatataatatatatataattatatataatatataatatataatataattatatataatatataatatatatataaaatatataatatataattatatataatatataattatatattatatatattatttatatattatataattatatattatatatattatatattatatatatttatatattatataattatataatataatatagtatataaaatatatataatatttaatatatataatattaaaatattaaaatatatattatattatatataatatataatattaaaatatatattatattatatatatattatattatatatatattttataatataatataatataataatataatataatataataatataatattatatattattattatataataataatataatataatataatataataataataatataataatatatattatgtatactgactcataaatacatactgactcatatatatattatataattatataatatatattaaattttatatgtatattatatataaagactttaggttactgttgagaaggcatgactggttttgaaatataaggatatgatatttagaaggggccaggggcagaatgatatggtttgattttgtccccacccaaatttcatcttgaattgtagctcccataatttccacgtgtcatgggagggacccagtgggaggcaactgaatcatgaggagtgggtcttttccgtgctcttctcatgatagtgagtaagtcttacaagatctgatagttttataaaggggagttcccctgcacatgctgtcttgcttgccaccatgtaagatgtgactttgctcctcatttgtcttctgccatgattgtgaggcttccccagccatgtggaactgtgagtcaattaaacctctttcctttataaattacccagtctcaggtatgtctttattagcagcatgagagcagactaatacagataccatctcacaccagtcaaaatggccatttttaaaaagccagtaaataatagatgctggctaggctgcagagaaaagggagtgcttatacactgttggtgggaatgtaaattagtgcagccgctgtgaaaagcagtttggagatttcttaaataacttaaaaaaagaataacagaataatcattcaacccagcgatgtctttactaggtatatacccaaaggaaaattaatcattttacaaaaatgacacgtgcacttgtatgttcatggcagtgccattcataatggcaaagacttggaatcaacctaggtgcccatcaacagtggtttggatgaagaaaacttggtatatatacaccatggaatactacacagtcataaaaaagaatgaaatcatgtcctttgcagcaacatggatgcagctggaggccattatcctaagtgaactaacacaaaaacagaaaaccaaatactgcatattctcacttataactggcagctaatcattgaatacacatagacataaatgtattttaacacattattattcccacttagattctgtgtaatatttaaccatttaattacatcaacaaataaaagcctttagaaattgatgtatctagcacaattaaggggtaatttgtttatgattacaggagtcatttcatttacactaatttgatgtgaggagacaatcaaattccttttttcctataagaaaaacttaattccgggaggcttaggcaggagaatctcttgaacccaggaggcagaagttgcagtgagccgagattgcaccattgcactccagcctgggcaacaagagtgaaactctgtctcaaaaaaataaataaataaaataaaataaaaagtaaaacttaaccctcacattttttctttaaaaacattacactattgaaatagaatagaattttggacctcaatgtttctatgctttttgacaatgtaaagattatatcaagaataacattgactccttgtgcacatgtgtgaaactatgtcgagctgatgtatccagaaaagaaattgcagcgatattgggtatagaatttccaatctcaacctccttcttgttgtggaatagaaatttagttccaccttctctgttcataatacataagagtagataatcagatatgaggtgattaaatatataaactgatttcacagttaccatggaaagaccataatatgtttggacgaggtgggggaaagagtctccctctgaactgagatttgaataggctttagatagactaaaaacccatggcctgtcttcttcaacttcccatcattgatcatctgggagaatcaaaatggcctggattataaagtgattacaattagtagggcaggcatactaaataaaaatggggtgagtgtgcttggatgggaaaaactggggtgcagagaaatatttcctgttttggaggcttcgttcatagcgagcctgaggatgcagatgatatggaacatgagccccaccaggatatacatcctcctgcacagtcttccctgatcagtgctgtctattgccctaggcaccatcctcagccactctgtgttaggcacttaggacagttctgttcaaagcatgattgctttctggtcagtgaagaaatagtaaagaaatgagagtctgcttttgaagcttttgtagcaacttaacatttctgcaatgtcgtggtacatgttttatattttttaaaagtattcatctgcagactagaaataaaagagtccttcagcacagatagtttgagagatgctactgtagagtgccctgggaggatgggattcttctagacattgacggctccctggagtggtgctggagcttgctgagatagggacgcggggattgctgtggaacagcatgttgtgaaaacaggcacagatgggctgttgccacgtactcagtatttggcaggcccaggcaccctgccccggggagacagagcaacagctgtcatttccaaaaatgtgacacaaatatgactttcgttttttattgtatgtgtatgcatgtgtgcatgcgcatgtgtggttggtgtgtgggtaaataatattggtgagggagttagcagtgcagagacgcagagatgaatctaatgaatttatatttggaggcccttgaaaggagccctgtgcatgcataatcaggaagcagaagtgcagtcgtaggccagtcccatcctctggtggaaacagcaaattacagccttagcacttctcacctgtagcaaaagaaatgtatgctgcacctgggaggggtaggagaacttcttagaatttggtgggtttattagtcagggttgtgtagagaaacagaaccaatgagataaatatgttagatagatgatagatagatagatagatagatagatagatagatagatagatagagatgatagatgatatagatagatgatagatgatagataatagatgatacatagatagatatagcaaatagatctatagatatgacagagagagaatgagagagatttacattaaagaattggctcacatgattgtgggggctgcaaatcctacatctgtagaatttgctggcaggatggaaattcaggtaagagtggatattgtagccttgagtcgaaagtccacagggcagcaagctggaaactcaggcaaggtttctaggttgcagtcttaagaagaatttcatattctttaggaaacctcagtctgtgttcttagggtcttcaactgattgaatgaagcacaaacattatggaaggaaatccggtttactcaaagtctgctggattaagcattaatcccaactaaaaaacgccttcacagcaacatttagactactgttcagccaagtatctgggcaccatagctcagataagttgacgtataaaattcaccatcacaagggaggaatttatatatacactttattgcagcaaaatctttacagtttaacgttttgtacttttcccagaaggaaacgtttcagtgcagagttgaatatcgcatctttccgtagctcatacaaatcccatacaactttgatttgctgagcctctcctgaaaactggacaacttaagtgttcatgaaaggttttaattgcttaagaaaatagactgtttgtgtgaattacaaagaaaaagggattttagaaggaacattggtactccgggaagcaggttggggcaaggcttgcataagtgaatcagaagttttaggcacgaagtcagcacctctgtcatggcctatgtcagttgagtctttacctttgcctcgtgcctggccttcagaccctgtgagcccgctccgggacagggttacggccaatccagcagagattctggcaaagcatcccgggaatgagagtgagaaaggcccaaagcagtcaaggcccaaagacaaccctcgaccccatctctccaaatgtcagccctcaagatctcaggctctctggacctcaatctccatgccacttcaaaggccccaaatttcagccccagcagctccagctcatagccctaggtcttcagagatcactccagtaactcccaaatatcaccccagggatccagttctgacagccaagaccactcctctcataaaataatcgcagatattaggtgaagatccccaaagccccaaggaaaccctaaatctcatcctgaggacaccgatcccaccaaagccccgaggaaaccccaaatttcatctcgaggacaccagtcccaccgttaggaaccgggacctcaacccacagcacccggattccgagaacagaggcttcggggccaaatgggctgaatccagtacctcactcccacgcccccgggtggacagcaaccctcctccaccgcgtcccctcgtgggttttaggtcctatatttgagggatgtggcctcctccttttatatcatgttggccaagaatgatctacacagtcatcatggaatattgcatggagataaggagtggctgtgcccctgcctgaagggctcatcccattcatgaggcaggatgaccctcaaggcagtgctactcactagagtcaaagctcaggtaaggtgtttaggggccagttgcaacatgaagcacattagccaaggcagtctcaaagagtattgccagaggaagaatctacacctggctgtttaatgaggttgaaaggcaaatctaggtcaagcaggccaagtaaagaggtcagcccagcactttgggaggcagaggcaggtggatcacctgaggtcaggagttcgagaccagcctggccaacatggtgaaaccttgtctttactaaaaatacaaaaattagctgggtgtggtggcacgcgcctgtaatcccagctattcaggaggctgaggcaggagaattgcttgaaccagggaggcggaggttgtggtgagccaagatcaggccactgcactccagcctgggtgacagagtgaaactccgcctcaaaaaataaataaataaataaataaaaataaaaaagaagtcagaaagcccatgaaaaacatttggagggaagaagttagtccaagaataaaagcattaggtcagggcgtctaagatccccaaggattggtcctggctgtgtagacacttaaagagattgtgcaaggctggacaggagggtgagctggccaaaaaggtgatctgctaactgtggaatcaaccaccgcccaatgtcctggataactgagtctgactcgcaatggttaggcttaccattgtaaatcagtcttgaagtataaacaagttcattaaactacccctcctgtttacattttcttttattccctgattcatgtaatctctgtagctcatatctaaataaaaaataataacatggacttgttattatgcatgtcgtggtttacttctaactgtaaagtttctgattattctcctgtcatgctgatcttcatgtcagaagaaaacgctttgctattcaccatgagtgcagaaaactgcttactagaaacgattctaaacagcaaaggatgtatatttgaaataatagggttgtaatgaaaaagtacatatttctcaatctcattcaatacattgtacccgtagagtaaaagatatagaaaagcatcttatgttttaaaaatgtaagtctgagagtgaaaaacagagacaataaaaacctttctctaaatattattggtggaaaagtctcaaagcaatagaaagtatatataaaatgcctgtgaatttttgtgcaataaaatcatatatatatatgtgtgtgtgtatgtatatttgttttttttgttttgttttgtttttttttttttttttgagacggagtctcgctctgtcgcccaggctggagtgcagtggcgggatctcggctcactgcaagctccgcctcccgggttcacgccattctcctgcctcagcctcccaagtagctgggactacaggcgcccgccactacgcccggctaattttttgtatttttagtagagacggggtttcaccgttttagcggggttggtctcgatctcctgacctcgtgatctgcccgcctcggcctcccaaagtgctgggattacaggcgtgagccaccgcgcccggccaatgtatgtatatttgtaactcagatttgtaaatgcagccacattcatatccacacatcaaatgcaccaaaaagattcactaagttcctcatagtcagtccataaattcccagcttcttcacatattcgcattttttgtcttaacatgatataatagttaaaaaaatttaaaaattaataattaaccaagtttttttttcttgtagactatatcagccattattcagaaacattaattcattgttttaaaaataatttctctagagatgtttggcacttagtatatgaaatcatttataattgaataatacaaacaaaacagaaaaaagaacttacttttgggacatctgaagaaagtgacctacaaactcagtttatccctgagtctcattatttttaggaaaatggtctctatgtcatctctatgttatgtttgacttgtcttgcttgagtctgttttccagaaagattgtgatccttggcctgttgaatatgaaatttacatgatcactcttgggaaaaattccttttttagtgactgcaagccaggtcctgtggccgagaagcatcagctgtacttggttgactgactgtattactctgttttcatgctgctcataaagacatacctgagacttggcaatttacaaaagaggtttaacagactcacagtgtcaagtgggtgggggtgcctcacaatcatggcggaaggtgaaaggcatgtctcacatggtggcagacaagagaagagagcttgcgcaggaaaatttcctcttataaaaccatcagacctcatgagacttactcactatcacaagaatagcacgggaaggacccacccccatgattcaattacctccaaccaggaccctccacaacatgtgggaattatgggaactacaattcaagataagatttgggtgaggtcacagccaaccatatcactgactttcatcatattataaagaactatcttgcagagagaatctgctttccatctctaataatttgtttattctggatatttcacataaatagagttatataatatttgttgctggctttttcatttagtgtaatgttttcaaggttcatctgtgttagagtatgtacctttgcttcattcctttacatcactaaataatattcgattgtatggatgtgccacattttatttgatctcttatcagttgacagactgttgggtttttctactttttggctattacgaatgatggtactatatgaacattcacacacaagttttcatgggtatatgtttttatctttcttgggtatatacctaggtgggggattgctgtcatatggtaactttatgtttaacatcctgaggacctgccaaactttgccaaagtggttgtaccattttacattcctaccagcaatacatgactattctaatttatccacattctcaccaacaattgttactttctgcctttctgataactgtcttaggagctgtgaagtggtgtcacattgtggttttgatttgcattttcctaatgtccagtgatattgggcatctttttatatgcttactgaccatttgtacaacttctttggggaagtattcttagaggttttattgaagtggatgctttttatttcatttccttaactaaccacctagctaaaatattgagtataatgttgagtggaaagcagacatccctttattgttcttgatcttagaggaaaacattcattctttgatcagcatgtttttagatacagattttccaaaggtttcctttattaggttggaaaaattcccttccattcctacactgttgttcttatcatgaaagaatgttgaattttgtcaaatgtttttctgtttcaattgagatgactatgtagttttgatacttgttttatttttaaattttttttatttccataggtttttggggaataggaggtatttagttacatgagtaagttctttagcggtgatttgtgagattttgatgcacccatcacctgagcagtatacagtgaagctagtttgtagtcttccattcctcgcccccttcccacctttcccccttgagtccccaaagtccactgtatcattgttatgcctttgtatcctcatagcttagctcttacttatgagtgagaacattcgaaggtgggtttcccattcctgagctacttcacttagaataatagtctccagtcccatccaggttgctgtgaatgccattaattcattcctttttatggctgagtagtattccatcatatgagtattccatcatatgatggaatatatgccacagtttctttatccactcgtcgactgatgggcatttgggctggttccgcatttttgcaattgtgaattgtgctgctataaacatgcgtgcacaggtatctttttcatgtaatgacttcttttcctctgagtagatacccagtagtgggattggtggtccaaatgctaattctacttttagttctttaagaaatatccacactattttccatagtgtttgtactagtttacattcccaccagtagcatagaagtgttccctttttaccaaattcacgtcagcatctattttttttttttattacggtcaatcttgcaggaagaaggtggtatcacattgcggttttgattttcatttccctgatcattagtgatgttgagcattttttcatatgtttgttggccatttgtatatcttcttttgataactgtctattcacctccttagcccactttttgatgggattgtttgttaatgcatctgttttcgtctgatatttattttattaatgtgatgtattatattgattgattttttggatattaaaccactaacatttatgagatggatcccacttggccgttgtgtatgatcttttttgtatgttgctgaattatttttgctagtattttgttgaggatttttgcatctatactcataaaagatattgatctgtagttttctttttcatgtgatatctttgtatggttttggtatcagagtaatactagctttataaagtgagttgggaagttgagaagtattacttttcttgtattttttggaagagtttgagaagaattggtattaattcttatttaaatatatatttggatttatcagtaaagtcatctgggcacgggcttattttctttaggaagttttaaaattactaatttaatctctttatgttataggtctattcaagttttctattctacttgagtcagttttgccagcttgtgactttatatgaatttatccattttacctaagttagctgatctgttggcaaacatttactcacagtattcccgtataatcatttcaatttatataagatagtgatgtccccttccacctcctttttttttttcgagatggagtctcgctctgttgtccaggctggggtgcagtggcatgatcttggctcactgcaaccttcgcctcccgggttcaagcaattctcccgtctcaccccccccgagtagctgggactacagatgcctcccaccaaacccggctgatttttgttttttttgtagagacgggtttcaccatattggtcaggctggtctcaaactcctgacttcaggtgatccgccctcctcagcctccaaaattgctgggattacaggcgtgagccactgcacctggccccatctccttctttagaaagccaccacccacctgccaggctgtactgccatatccccctttgctggtgctcttgcagagctctccaaaaggactgtaatcccaggtatagccctgggtctggtggcctttattctctgcctgccaagccttattgataagggctggccctcaatttgtgacttaacaacacacaatcagttatcggatccattttcccaagggggaaatctttaaaaagcatgaaaactaatacactgtgggctaaaccttatacaacaggaaaatagaaataggatattgcttggaagataaatttacttttctttctttctttcatggactacatctgcaagtacccacttgcagccattccagagaaatcctatgaagtgagtgaacatactggcttagcaaccggcttgcttttttctcagctcatgatggagcagcagccagcccagcagcgcacataaaatctgtttcatatctttccttaccttcttcccctttttcttacgctcactgccctagacttacaccttccaaatgaagttgaattattagctaaggctcggctttctctggttgtcagatgggtggggttgaacaaagtggaaggcaaagatctaaggatgagaagactacatgcggataagagctctagtgctgatggataatctgggagtcttagacttttaatgatgatttcagtaaacagaaacttgatgtggttaattagaaagggtttgcttgcttttgcttttttttgtttttttttgtttttgttttgagacagagtcttgctttgttgcccaggctggagtgcagtggcacaatatcggctcactgcaagctctgccttgcaggttcaagcaattctcctgcctcagcctcccggatagctgggactacaggtgctggccaccatgcccggctaattttttgtatttttagtagagacagggtttcaccgtgttagccaggatggtttccatctcccgacctcgtgatccacccgcctcgtcctcccaaagtgctgggattacagttgtgagacactgcacctggcctgcttgcttttttagtgggaggtgcataatcaattccaattactgtctttgagaagattgttccttagtttgtggtagtggagtgggagcaggagggaatagctggtttggcctgcagcacatgaaactccaggtatctgcctagaatcctgctgtggtctagactttctttggaaacatattttaaagtcatagttcctttattttattacttagtgttcataaacctaacacatgttcagctgagctttaagaatatcagtcttctgattagcaacgtagaatacctactctctagggtgttgagaaagattttcaatttgaataataggagtaaaatttaatcagaatcctagttgagaaaaatgtaacatgggacattttttaagaatgtagagtttattttttctaagccaaaacaacattacctatacaattttcatgtgtcttgaatccccaaggacattaatcctgtagtatattgacagatgcaaattaaatacatatacacactgttctatctattgcattcggcaagcatgataaatgattttctccagcaatgctcagctccgactggaaaagtggaaaactgcaagacttgagtttgggagtttaggatgggtttgggggaaggcaaaatgtgaccttgaaaatatagtttaagtgacaaagaaaggagatgaagttagttagggttggaaggcaggtcaaagtatggatgggccttgaaactgtaagttctcttttgattatctaaaatgaatgacataattaacaagacagagtttcaaaatagtgagataataaccaaatatttagcaaatggagctactcaaagtgttagaataacacatgagtttagcagaagataaataataaaaaggacaatatgaaatccacattatctgatagaaacatttttgcttaaattttccatcctttttttttttaataggacagtcttttccaccattttcagctcattgcttcctgaactcaaccatgtcagtcaatgggctccaccttaaaatttgttcagcattaaggatcctaaatgaaggactgggcagtgtggttctaggaaagcatgaacctatacagggaagggtaaaaattcaaactaagccaatcataaaagagactcttctcctggtcaaactcattatgatttactatgcatctattagtgagggaagaactgtaagccattatccagcctctagttacaatcttatattttattatatgtaaagagatattaaaactgagtttatattctatagtgcatttcccaaaaataagtctgcaaaagtttactgtgacctgagataaacgtctctctattctctaagagcaagtaatgaaatttgtcaggttctacatttgtaaaacaagcaaatcacagtaggatcgctgaggtcctttatttttattttttaaaagacagagtctcacctattgcccaggctggagtgcagtggtgcaattatagcttcctgcagcctcaaactcctgaactcaagccaccctcccacctcagcctctcgagtagctggaactacatgttcatgccactgtgctcagctaattaaaaaggtgtttgtgtgtgagtgtgtgtgtgtgtgtgtgtgtgtgtgtgtgtgtgtgtgtgtgttggtagagatgggatcttgctatattgtccaggctagtctcaagttcctggccttaagcaattctcccacctcagcctctcaaagtgctgggattacaggtgtgtgtccggccttcgaggtccttttccaccaagaattctaagattattgtgtagcgctggtttaaatgcactcccagggttcatgtgaggagtcggtgctgagtcaaggtctttttttcccagtaagctaacacatccacttcagcattaacctttcctgtcaagacaacccaaggaatggctttttacggtgccaccccagaaagagagacttcattttattttcaacagtctttgccacacttgctttgtcagaagttttgctgattcagtatatactacagtttgttgaggtctttattttccctcacagaaataatctacagattattatgtgacatcactgaggcccgtgccgtcttgaaaatattcaaagggacgtgaacgtcaaacaaaatgtattccaatgtctatagatatttctattaattactgaacatttgtattgctaatttactagatttgttctcaaaggacaatttttgcaggttggccgaatgtgctaagcacagaacccaaaatttctaaataaaggagatcaactgttctgaattcctcatttttttactaaagataaaattatcgagcagttggtttaaataacatataaatctagaggattaggggagattttggaaatttctggaaatattttgggttgtcacacttggggagtggtactgccatctggtggataagagagcagagatgctgcaaaatattttacaattcacaggacagcctcccccaccaccactccaacaaagaagtttccaatacaaaatgtcaatcgtgccactgttgagaaactcacatctcatataagaataaactaagtatcattaaaattatttctttataatccttgtaatattttcatttattgaggcttcaaaataagttattcttaccttctatttcaaatactccaaacattcatgcaatataacttttaatctaagtggagatattccttcctagtttttttatattaagttaaaggataaactcatccaaaggcattgtgtcttgggttggattgtgtccgaagaggggtttggaggagacattaaaatatttccaccaacttatgataagagtttcatttcaagacagtgactttttttttctttttgatggagtctcactctgtcgccaggctggagtgcagtggtgggatctcagctcactgcaacctccgcctcctgggttcaagcgattctcctgcctcagtctcccaagtagctgggactacaggtgcgcgccaccacacccagctaatttttgtatttttagtggagacagggtggtctcgatctcttgacctcgtgatccgcccgcctcagcctcccaaagtgctgggattacaggtgtgagccactgcacccggtcaagacagtgattttagcacaagatttccactcttttgctttgcaatttccatgaatataactcagtaaatcaaaacaagaagataatttattttagcactagtaataggcaagttactattgcttggctagacactttcaggttggtgcaatgtgaatacactgagaatgaaggaagtatccactagccagagagtcaacacagataaacacgtgggaagacagtaggaaggatcactcttgcagagttctgcaccaggtaaggaatggcaataggaagcatggaacagttcaattgcaattgcatcagtgccctgcatgcttgagagattcttaccctaggtttttgctttcattgttttcttggcatgaactactgtactagtcgatgtaatgctgactatctgttgtaaccaacccctaaatctcaacaatctctatatcttaatacctcacagtggtctgtggcagttcagggttttctttttcttttgtttgttttctttaagttaccacagtagaggacacccaccttccttccccatgaccctcccatcttcaaaaacagacacagagcaacaagtcttcatgtttcaaatctctatgacttccccttctgccactattctaagaaagctctctacgtttaaggcatcagatgattagatcaggcccacacagataatctttcttttcctaatgtcaaaggtgtcatgaaatataacagagacaatgaagcaatattgtgtcatattcttagggtccagagattagggaggcagatctctactgggccattttggaaattctgcctctcacagtgccaaatataaataagaatatttgttggtaatgttattatgaagattgcataaaataatcaatatatgtacagaacctagttataatgtgtattcttagtctaataaataatgataatattgccatgatcatattatgcttccaagtttactatttcactttcttttatagaactgttggatataaatcctttgcttaacacactttcactgagattattattggcatttttttttagctttgggaacatactcttagaatactgaaatgatgtgtttcttcatcagctcccaacatatagcacattgacactttcttgttgaaaactgcttcactgaagtcctgagtctgagtgtgtcattagtgcggatgaacccagtcttataaaatcaagtcttatttaaggcataggccttatatacaatgataatggcacagtctttggaaatttggctcactgcaagaaacacttactctattactgatgtacgtaaagtgaactatagttttcaatgggttgacttgtatcaactcatttgtgacttataaaagtcaagtgactcagtaggatcagtattaatgtctcttttttaaaaaaaataagaagtctggggcccttggcccaaggtctcagacgaatattcttacgggttgatggaagtgttttattttcaaaaactagaagaatataagaactaaaatcaaagccaaggtctttcacacaacttccttcaagtattcaattagatagcaataataatagtattaacaagaaaaactcacctaaataagagtatacaagtttattttaaggtgttcatagggttaccagttggataggtcataataatatatagagatatgggaaattaagacctatgaagttttaattatttgcataagagtatgcccttgcatcataagaaaacatataaaaacagaaatatgtttcaaacttgtgtataacatatatatacatgttcaacttgatcaggttcttactgaaattatttatttatttttattatactttaagttctgggatacatgtgctgaatgtgcaggtttgttacacaggtatacatgtgccatggtactttgctgcacccatcaacccatcatctacatcaggtatttctcctaatgctatccctcccctagcccccatccccccaacaggccccagggtgtggtgttcccctccctgtgtccatgtattctcattgttcaattcccacttatgagtgagaacatgcggtgtttggttttctgttcctgtgttagtttgctgaggatgatggtttccagcttcatccatgtccctgtgaagaatatgaactcatccttttctatggctgcatagtattccatggtgtatatgtgtcacgttttctttatccggtctatcatttgtgggtattttggttggttccaagtctttgctattgtaaacagtgctgcaataaacatacgtgtgcatgtgtctttatagtagaatgatacagatttcaaatttcctttataggcacaacagacaaaacatggactcacaatctaaactctgaaaaatgacagaaaaggaaaaccagtgaattaagaacaagtatttaaaaagggaattataaaaagcaaatactgtgctgctgggtaatcaattgactccccttacccggaagtcaatagggtgtcttaatttatactttaatcaaaaaaataaataagaaaatatttaatattttgaagttcagagaaagaaaattaagcattctccatgacatcctcagaaatgtagacaattctataataaatgcatttttaaacttaacacagtaggaaacatgggatttggttgctggcacaaaggctgcatggtatggcttaggcttatgccctatgatcgccctcactgacatcgcctgttgtctcactgtaagaaatactactgaggataattattgcatgagtttcaaatgcattttgtaccacctctgatataaggcatattaaggctataaaatattatctttaaaagagtcacaggattaaagaaagatatagggtatttggagctttaaggctcttcctgcaggaggagtttccacttcaccgagggatcaaagtcctcttcaagatcacccagctcctgctccttggagagctccaggaaaacctaaaaggaaggaaagaaataaagagaggagaacaatgccatactgcctcctgcagctccaggcgaatgcattatacatgtatattccatggatgatatagaatcactaaaaatgacccacctgctccagggtagactgtgagaggctgtactcctccaggtcgaaactctgtttaactgcataagaatgagcatacattaggaattctattttttttttcagtgagttttaccaagtaacaaaccaaaatacatacaagtagatcttaaacataaaagataaggtaataagtattcttagactaaatatgggaaagcaaacgcgatatagtcatataacaggaggaaactccatccctttcatctagagtattggtagaggcaccacaaaactagaaagcaatatcagaggttccagagcatctgtgcagaacaagctaagagatggtaccctctgtgctagacgatgaccacgtacccctctgtaccagccctcattcttgtctactccaaaggctgatgtaacagatgtcttctggtggacatcaccaatggcaagcccattaggaaggacaggggagacaggaggtcaaggcatttattctttcacttcctccctgacaccaagtgtgtgccttgtttctctcaaggtagtaagttctacatgactctaccctcaagttcaggtcattgcttcctctcttagtccctctggacctaagaatggtaacacttctattgtttctcgtctcaggtagttacactgttccatgtacctttgcaaagagtcttctgataaacaaacgttccttgaattatcctattttgagtttaccatctgataccaatttggaccatgactgagacctcaaccatgtagatacataagaagaggaagataatgaatggaaaaatgagactggaaggcaaatatttcttttggacagtgtcagactgctgtggcattttctttcttctttccttggacataggactagtccctatcttatatctggaaacatgtgaagaagaaatacagtgggtggctgacttccctgcacttgtagagtttagagaagcaaagatgcttgtgtgtttctcatggatttcaaaggggaggtatcttgagaagatcacctggaaagggaaaggggtttcaaggaagggactcaggagctgccaggtggtcacaggagccgccaggtggtcacaggagccaaaagcaggatgcatcacccaccccggggagctgtaatcagaggtaatagatgagggggggaaagaaagtcatcaaggaacccataaaagtacccaatgaaagaaagggccagcaattcttcatttctatactggagaccccaatgtgatatcatagctctaatgatcagatcaagctctgatgcaatattatctcttcttttttccacttacactacaccctggagaggcccaaaacattcgtttatgagtcatggaggaaatagagaaagaaaagacataaaattgaccatttcaccttctaagctataggtcttcaaattcgaagcaagtctgaccaagaaggggcatgtgaggctagggttttgctggagtttacattacccagcagagattggtggtaggaaagaatgaaactatgcaacaaggtaaaaggattgccatggagcaggcatttggcttggacgacaccgtgcctagcccattcaataagtgtattgcacctgagaatgtaacagtgtccaagaacatttggaggaaaaaatgctagcttacatctccacattttgtactttgtgtcgtcttcacatattggagcaagaaactctgataaatactttgtttttccccctaaatgagaacttcacttttagcaaattaagtactgcaggaggaatttgaggtgggagggaatgcttttgaaagcagaagcatgttgatttggggtggagagttctgtagatgtctattaggtctgcttggtgcagagctgaattcaattcctggatattcttgttaactttctgtctcgatctgtctaatgttgacagtggggtgttaaagtctgccattattattgtgtgggagtctaagtctctttctaggtctctaaggacttgctttatgaatctgggtgctcctgtattgggtgcacatatatttaggaaagttagctcttcttgttgaattgatccctttaccattatgtaatggccttctttgtctcttttgatctttgttggtttaaagtctgttttatcagagactaggattgcaacccctgccttttttttgttttccatttgcttggtagatcttcctccatccctttattttgagcctatgtgtgtctctgcatgtgagatgggtttcctgaatacagcacactgatgggtcttgattctttatctaatttgccagtctgtgtcttttaattggagcatttagcccatttacatttaaggttaatattgttatatgtgaatttgatcctgtcattaggatgttagctggttattttctcgttagttgatgcagtttcttcctagcctcaatggtctttacaattaggcatgtttttgcagtggctggtaccggttgttcctttccatgtttagtgcttccttcaggagctcttttagggcaggcctgatggtgacaaaatctctcagcatttgcttgtctgtaaaggactttatttctccttcacttatgaagcttagtttggctgaatatgaaattctctcaataaattaggtattgatgggacatatctcaaaataataagagctatctatgacaaacccacagccaatatcatactgaatgggcaaaaactggaagcattccctttgaaaactggcacaagacagggatgccctctctcaccactcctattcaacatactgttggaagttctggccagggcaatcaggcaggagaaggaaataaagggtattcaattaggaaaagaggaagtcaaattgtccctgtttgcagatgacatgattgtatatctagaaaaccccatcgtctcagcccaaaatctccttaagctgataggcaacttcagcaaagtctcaggatacaaaatcaatgtgcaaaagtcacaagcattcttatacaccaataacagacaaacagccaaatcatgagtgaactcccattcacaattgcttcaaatagaataaaatacctaggaatccaacttacaagggatgtgaaggacctcttcaaggagaactacaaaccactgctcaaggaaataaaagaggatacaaacaaatggaagaacgttccatgctcatgggtaggaagaatcaacaacgtgaaaatgaccatactgcccaaggtaatttatagattcaatgccatccccatcaagctaccaatgactttcttcacagaattagaaaaaactactttaaagttcatatggaaccaaaaaagagcctgcattgccaagtcaatcctagtccaaaagaacaaaactggaggcatcatgctacctgacttcaaactataccacaaggctacagtaaccaaaacagaatggtactggtaccaaaacagagatatagatcaatggaacagaacagagccctcagaaataatgccacatatctacaactatctgatctttgagaaacctgacaaaaacaagaaatggggaaatgattccttatttaataaatggtgctgggaaaactagctagccatatgtagaaagctgaaactggatcccttccttacaccttatacaaaaattaattcaagatggattaaagacttaaatgttagacctaaaaccataaaaaccctagaagaaaacctaggcagtaccatttaggacacaggcaggggcaaggacttcaggtctaaaacaccaaaagcaatggcaacaaaagacaaaattgacaaatgagatctaattaaactaaagagcttctgcacagcaaaagaaactaccatcagagtgaacaggcaacctacagaatgggagaaaatttttgcaatctactcatctgacaaaggactaatatccagaatctacaatgaactcaaacaaatttacaagaaaaaaacaaacagccccatcaaaaagtggacaaaggatatgaacagacacttctcaaaagaagacatttatgcagccaaaagacacatgaaaaaatgctcatcatcactggccatcagagaaatgcaaatcaaaaccacaatgagataccatctcacaccagttagaatggcgatcattaaaaagtcaggaaacaacaggtgctggagaggatgtggagaaacaggaatacttttacactgttggtgggactgtaaactagttcaaccattgtgagagtcagtgtggtgattcctcagtgatcttgacgtagaaataccatttgacccagcaatctcattactgggtatatacccaaaggattataaatcatgctgctataaagacacatgcacacgtatgtttattgcggcactattcacaatagcaaagacttggaaccaacccacatgtccaacaatgatagactggattaagaaaatgtggcacatatacaccatggaatactatgcagccataaaaatgatgagttcatgtcctttgtagggacatggatgaagctggaaaccatcattctcagcaaactcactcagcatgttctcactcataggtgagaattgaacaatgagaacccatggacacaggaaggggaacatcacacaccaaggcctgttgtggggtggggggaggggagagggatagaattaggagatatacctaatgttaaatgacgagttactgggtgcagcacaccaacatggcacatatatacatatgtaactaacctgcacgttgtgcacatgtaccttaaaacttgaagtataataatataaaaaaactaaaaaaaaaaaaaaggaaggaaatcgtgttgtggatgaatctagaggacattttgctaagtgaaataagccaggcacagccacacaaatagtgcataaccccacttatatgtagaacctaaataagtcaaactcagaagtagagagtggaatgatggttgccaagagatggccaggggtgggtggagggaagggaaggcaacaatagagggtagggaggatagagcaatattggttaaagggtacgatgtttcagtcagacaggataaataaattcagatttattgactgtataacatgatgactgtagttaataataatttattgtatacttgaaacttgctaagtgggtaaatctaaaatattctcagcacaaataaatgttaagtatgtgatgtgaaaaaaaaaagaaaaaagaaagcagaaacatgagcagccttttttaaaaagcctctagggaggcagccttcctgaaacatcaatctctgctcctaatccattataaaatacttcctgttgatctcactgcggaatccttccaactggaaagatgccaaccagccattggggcataatggtcagtgtggtcaatgtgaaaaacggccacatagaccacagggtgaggttgaccaacaggatgagaaagtgaaacaaaaacctatttgggtgatcctaaccctgtctcaagaagaatctcattaaaagctaggatgaccatcctggccaacatgttgaaactctgtctctactaaaaatacaaaaattagctgggtgtgctggtgtgtgctactcgggaggctgaggcaggagaattgcttgaacccaggaggcagaggtgcagtgagccgagattgtgccactgcaccactccagcctgccagcctggcgacaaaggaaaactctttctcaaaaaaaaaaaaaaaaaaaaaaaaagctaggatgcttgaggcctctgatgaaggcaggtaacaagccagaaagtacagctcaagaaggggcatgaggtttcatacactaactcatcagatttcatacactaacatgacagggaaaaaccaagcccctgatacattgatgcagtatgcaaagaccaaaatccaagggcctaaaatgacttacagattaacacacctaaacagagacaggaacctccttatctgcatctatcaatagatggctataaaacaatacatagaggcaaaaaccaaattcatatgtttctgtttgtatgagtttgtggataatctaccgctgaatgtacatggtctctttctcccagagccttgttcaattacagtagggtaccttggccccagcactaatgacgttttgactgatcactctttcctgtgatggctgaccaatgcactgtagggtagttagcatcatccctggcctccacccactagaaaccacttgcatccaacctctctgtccgcacttgtaagaaccccaaatcttcccagacattgccaaatcaccccttatggaaaaacactggattagcagtcttagtaatgtattaatgatataacagcataattctatgtttatgtatttttaaaatactggttctatgtcagatttaggcttatctgtttcccagagttttgtctctaaacagtcactcttacctatctctaatttgaagaaagcctgtgataaaggtcgcacatcctcaacaggcaacttatagaccatcagggaggagaacctgcgaagagaagacagtgaggctgaactccaggtgtcaaggttgaaaccccgatgggtacaagtctaaaaagggaaacaaggctaggcatggtggcccatgcctgtaaccactgcaatttgggaggccaagaagggaagattgcttgagcctatgagtttgagaccagtctgggaaacagatggagatcccatctccacaaaaaaacttaaaaattagccaggaatggtggtgtgtgcctgtattcccagctaccatggaggctgaggcaggaggaccacttgagcccatgggattgaggctgcagtgagcggtgattgcaccactgcactgtagactgggcgacagagtgagatcctgtctcaaaaaatgaaaataaaaaaatgaaaaggagcaacaatatcgtcaacaatctgtctaaatagtcacatctgtgcggtgttagagagacactcataatgtaagtgctctttgatcaacaagaagtcaatctactaagaggaggaatgaaagacaaagggaaggaaattaacagcccctatgccttatgaagggaagaagcagaacttcttatccttcttcttagtgagaagagagtagcatttcagtaaaaagaactagattctactcctgtctccacactctgagcctcagttgatttcactgataataatatatagaaatgttaagagacaccattcactgagctttgactgatgcctggcactctggcatgggctttatgcaggtgatttcctttaatgagggatggttttaccctctagaaggaacccctgagatgacctaagtgcatgcatgcatcagtatttggcatgttagagcccccatgcatgctgattctcttacaagggtcagctttcaaatcagcactttgttctcttatttccctcttgtgtgagcccttggaattgaatttctcttaagtaaagtacttgcaattaccatagagttaaagaacgagaagataaagctcttattccgtcatcatagcagaaatatggaaacaaaaaccaaggactgtgataaaacaaaacacctgtgtctacctttcctgctgagcagcctgggggaaaagcctcaggatctctgcatggaggggctccatttgtgccaggttcttcagcttcatctccagcaggtagtctttgccaaatttgcttttcaggtgttggatggaaccaatacatctgaaggtaacagaaggataaagtcaagcaagaaaagagaaaaatgtatggcttgtgatgttcagcctctggaggccagagtaaggccacatagagttggaagcaaccatgctagctcctcacgatgggtagcctggtgcagggaaataaactttgctcacagcacacaacctaggggctgagcgccggcttggacaggcactcacctcagccttcctgacaccatgatggccactcggtcacacaccgcctcagcctctgccatgtagtgggtggtcaggagggcgcccctctccgtgtttctaaaggtggcccgaatcacctgcctaaagttaagtcaagagaaaacgtgaactcatgggaatgctcaaggtatttggaattttaaaaagaagtttccatcgacgcaaagatgaaacatgcagcgaattcagactagacaaaaaaggggtgtgtgtagggatgacaggcacggaaaccaaactattggatagagtatataattcagaacgtagaaaatgatattgggtaagatgctgtttataaaaatactaagttcagaaatatttatgagaatgcagtaggaacaaagaaaattaggagaatttactaaaaagcttgataatcatgacatactccctataggtacaagatgacagaattcagaaacttcccaaaaataattttaaaatatattgaagatttggaatgtttctttttttcctccataggaattgtatatcaggtgatgttgcagaaagatttaaagcttcattatagattgatttggctgtataaaaatgttccatgtaggcacagacacaaaaattattcgagcaaatattagggtgagataatatagctttttcttctcaataaaagctggttgtgatttgaaatcagataattttttttcctaaaatattgcttttcctgatactgtgtcttttcctttctaagtaaacaatgattttgcaggccagttttcacaggatcaatacactcatgcagaggttgctcatgatagcacctcaccacatttgctgctgcccctcggggtccatcccggtcgacggctcatccagaagcaccactgacgggttccccaggatgctcagcacaaagcacagctgcaacgggaggaacagcccctctggttcccatctacggcacttgcagagcaacaacaagccctgcccgtacctttcgctttattccctctgacaaggtcttcacgggagccttcagctggtcctgcagcttgagcgcatccactaacctgaagaaaacagagtcaatccacataatcccaacactggcgaatgtacatgggagaatgagcaaatcaggagaaacacgacggtgggggaggtgtttatgagtggtcagagtggtcataaaatttaaaccacctaggtactttatgaacctttcatagtcatcaaactcatattttcaatgatgtctttccatattaagaataatcaggctggaccgggcacagtggctcatgcctgtaatcccagcactttgggaggctgaggcaggtggaccacgaggtcaagagattgagaccatcctggccaacatggtgaaatcctgtctctactaaaattacaaaaattagctgggcatggtggcgtgcacctgtagtcccagctactcaggaggctgaggcaggagaatcgcttgaacctgggaggtggaggttgcagtgagctgagatcgcaccactgcactccagcctgatgacagagcaagactccgtctcaaaaaacaaaacaaacaaaaaccaagaataatcagtctgggtgcagtggctcacacctgtaatcccaggtggctcacacctgtaatcccagcattttgggaggccaaggtgggcagatcacctgagggtcttgaaagaccagcctggccaatatgttgaaaccccgtctctacaaaaatacaaaaagttagcccggcatgatggcgggtgcctgtaatcccagctactagggaggctgaggcacaagaatcgcttgaacccaagaggcggaggttgcactgagcactccagcctgggcggcagagccaaactccgtctcaaaagaaaaaaaaaggaaaaaagaaaaagaaaaagaaatcaataaacatttttctctccaggctcaaagtgagagaaaacaacactgaacagagttctagatgaccaaatcttctcccacaagcatggggtcatcaattacaacctccctgtcttcattttgtgtgtatgttattaatacaacatcccctccagcaaaggggagtgccccccagtcccaggtaccgtgtgatggcgatcattgcgtcccctttcctgagacctttcacggcagcgtacacctccaggtgctgcctcactgtcaggttgggccacagcgcattctcctgagggcagtaccccaggaagcccaggggttcccctccaccgctccctttcaaaatcacctatgcaaaataagttcattcttagattctatcccaaatgtcacgtatatgtatatgcatgtaagccgtacttcagagatgcccttctcttcacacacacaggtgctaagtgcacaaatgcaaatcagtaatcacttaactttggggaaaaggtggtaaaagcccactttaaaaggcagacattccatggttatccattgtagtgtagactttactaccaattccatgaccgtgattgaactcaagattgctgatttgagtgtcttttacttggcttcattcattgatccaaacattcaaaggaatagatacttgttgagaattctgtttcgccagtgatagttataattataggatttatcttgcaataaggcagtggttctcagccaggggaatcctcctcctaggggatatttaacaatgtctggagacacatttggttgtcacaattcatgtgtgtatgcattgggaaaacagtattactggcatctagtaagtaggggccaagggtgctgccaaacatcctactatgcacagaacagctccccacagcaaaatgacattatcaagtccataatatcgaggttgagaaattctgaactaagaaataaacaaaaaacttttagcactgtatctagcccgtaggaaccaatatacacatgatagcatttattatttttattagccaggctatgctttacaataataagaacatctaatgtgtcctcagtgcttcctatgtgccagaatctaagcatataatatatttttaattacattatcctatccttacagaacccctgtatgtgttaggtgtttgttttatcattgatgttttacatacagaaaattatcacaagcatggattatgaaacttgtacaaggtcacaacaaggtaaatctcggacttgaagctgggatccaccttcagaatccaagtccttgaccttgatgctatattgtctccccccagtacaaaggagagagctagttaaccttgcctcattgagctttcattttggagaaagaaacataaaatataagtagtaagtaaacacgtaagtgaacaatttataacctctgccttgtgctttcaaggaaatagatatgctaaagaataacagggaggatttaatttagctgacagtgtagttaggaaaaggcattttggggagataaatttttaagcgatgagaaggagacagccaagcacatgaggagccaacagaagggcactctagccacaggaagatcaaacccaaagatcccacagcgagaaggtgcctcaaggccaatgtgagcaggcggtcaacagaccacatcatgctgggctggttgcagccatggtaaagattttggatcaattctaagtgagaggttgtacatgggagattgacatgacctcatttgcgtttttttttgtttgtttgtttgtttgtttgtttttttgtttgagatggagtttctctattgttgcccaggctggagtgcaatagcgctatctcagctcaccgcaaccttggcctcccggccgggttcaagcaattctcctgcctcagtctcccgaggagctggaattacaggcattcaccaccacgcctggctaattttgtatttttggtagagatggtgcttctccatgttggtcagattggtctctaactcctgacctcaggtgatctgcctgcctcagcctcccaaagttctgggattacaggcaggagccaccgtgcccggacctcatttgcatttttaaggactgttcttgctgcagtgtgaggcaagagtggaaatggaaggacaggaaacctctgtagcattgaacgccactgtgcgaccttccttcataaacactccctctgacattgagctcatgttcaaggtcaatagcatttcctcttggaagttgtggtcctttggcttctgtccatcattttacccaaacttggcctagacataccactaaatggtactcatatattattctagcttttgttttgcaatttagataattatccatttttttttcattaaatctgatttctcttgtcttaaatcctggatcttttaccattagcccagaatcaccattgtccttcaagaatttcagtgtatctgcaataataccctcaactgctctatcactacattacatcatcagggccaagaaatgtttcaataattgtaggaaagtttctgtggtatataccttcttaaagacctatgaggttttactcgctaatggactcttattgttacacaagtcacacataatctttaattatagcatatagctagaggacagtcattaaatatgaagactcatggctctgcaaccacataggcaggagttgtcattattctgacagtggtttctggtgtcatgctgggtgagggcattaaattcgacaaagttcatgggatgcataaatcaataaagcaaagatatctgactttaaggaagatatatttccttttaaaatctttatttttcactcaataaaaggcatagtatatatgatatgtagcccttctcagaaacaaactgtttttggaattaagtatataaatttttaatcaatcttctttattcaatgcataaatcacactaagtgattatggatcaactacatagtctattattgccatcaatattctttgtaggtagcactaatgaccatattcctgtacgttttactgacctgtcctgcagttggttttgtgtctccagttatcatcttaatagttgtacttttaccagctccattgtgtcctaacagtcctataacttcacctgaaagaaagtggtatgctcagaaatatacaaataattgcaacaaaaataaaagcaaataccatttgagggctgtgtgtcaagtgctatgtgaaatgtgctatatatattatttcccttattcctctctctctctctcacacacacacacacacacacacacacacacacacacacccctgagcattataactagcttcattttacaggtgaggaagctaagacttaaagaggataaataagttgccccatgtcatacagacagtaagaggctgagctggaagttgtaacatattttgatttcaaagcctgttgtacgaaccccccactttcacgaaatgggctgttttgggggaatggagaaagcactgttatgcctccattggctcccttctgtgtagtattcgctgcaataacattgttacctaaaaactataccatccttcttaacagaaagaccgcctcttttcattgttgttgttctgtttgtttgtgttacagaacagacataactgtcttcctatgtaaagaaaaaaaggtcgttatcatttcaactgaggcttttaagcaggaggagcaggcttagcctgctgcgtttgtcaatagatgtccccagattcagatactcttattccctgaataatccagtcttcagattcaagattgctctactaatggaactactgtttccaaccttttttaacacaaaaagagacatttcttgtggcaatttttttcttccttttagaaaagcaatttttctttttgcctgcatattccttccgtagacagctggcaatgatgacgggtgtctgtaaagacaagtaaataacaacgggactttattcgcatcttgaactgagagggtgttccacactcttgtcaccaaacctttccttataaaaaatcatgaatcaaaccacttcttcccctagaaactgccattttcaagtgaactcttacagtctacattcctgcaaggaaagggcatttgcaccatatcctgggatttgttctttggagagcaggaatagagacagtcactgaaccaacagatttgataagacacacactcccataaacaatcatgcacacaaacacacacgcaccgcagacaagctctctctcagtgacttgcagtaagcttcactttggttataaaacacaaaatcttacttaagttttgtaatgtttagctgtacttatcaaaaccacaaccctgaaaaataaatcaatacaagtcaatatctgtgtgtgtgtatgcacatgcatgtgtttcttgagacagaatcttgctctgtcacccaaactagggtgcaatggtgcaagtatatctcactgtagccttgaactctcaggctcaagtgagcttccagcctcagccttctgagtagctaggactacaggcacatgccaccaggctcatctaatttttttatttttaattttgtagaaatgggatcttacttgttgcccaggctggtctcaaacacctgaccctaagtgatcttcccacttcagcctcccaaagtgcattgtgtgtgttttctttgctctcttacatttgtgggccttgcatacctgctgaagtcaagtaataagctgtatgtgtaagaatgaaagaaccccaagtgtttttcgaaaactaaacttagaaagtttctcactttatctgtcagaaaaaaaaatagttgacgaagaacatttctgagttctacctcatcaaagtctcgcacagccatagcattcactgttctcattctttccatctggatatcttcctcctctccttcaggctcttctgggtttggaaaaatagcgttgcttcttggagaaattctgaaatcaaaacagtgtgataatgataaacttcgggttaaaaatcttgtatcaaaattaatgaattttctctatacttccaatttttggagtagattcattcagagcacaacatcctctctattcttctacttgcaccatccgcctttcaaacaccctagtttccttcagtgagtagagtaatgatatccttatatcatcttcgctttttaccaaagcttaatcctccctgttgatggtgacagttttctttcaaagaagaaagtggtatacaccctctggcaaaggattgtgaagcagagttgcatgaggaaaggaatctaggaactatagttttgacaacagatattttggaattctgaggtctttgtgagagccatgagtccaaagatttggaatcaaggatgtgtcccagagaatccaggatatctaatcaccataccaatgcctaattagttactgagcacagtcacttcttgggaatgtgtgacagaatcactctttcctctctgctacagactcgttcttgccttcatcatcccaccattgattcctgctcattcttttatctctccctcatgccacgctctgacattctggttgcctgttggtttcctaaaacatggctgtcatcttgtcactcttctctgctaccacaaacattagacttaagcttggtttatattttatatggaaggctaagtgttcaagacacattggtgtcttggtttcacattatgtaatttgcaaaacctttcctatacttttctgtttcaagatcctccaatatctagcctcactttcatttttcatcatcccccaacataagcctacaaaggagctcctggtgccttcatctcatccttggttttattgcacaaactattcttccttcccggattggattaactttcccaatgcttatctatatttacccattattttagagattccacctcttacacataactttcctctatagtaaaattatggtctgccttaattttccagtgtctcgtgtgtgctaatatggtttctctctctagattgtaagctcagtatatattcctatattatgggttataagaattttgtatatcacagtctttaaaaaccatcctgtgaagtgtcttttacttaattaattcagcacattaaaaagtccttaaagaatgaatatcaaaatgaaacatgaaattcgatttgattttctcaacctgaacacaggatcctttctcattagtttcttcctgcagttcatttctaggcatcgcagaatgaaaagaaaaatgagaaaatgaaggtaaggctagggaaaaagaaagacaatcacaattagtatcactataaatgcaatgatttcaatattggaattgatttaaagagtttgattatataaaaattcgatttgatagcattcatttttacaaggctgaaagacaacctgtaatattctttgaaactgtcaaagttagcctcactgctattcagagagagcctaacagaaatataatagtagcaagtgaaaccagtactacccatgacagataattattgtaaagataggagtccagggccaggagcgttggctcacgcctgtaatcccagcactttgggaggacgaggcaggtggatcacatgaggtcggaagttcgagaccatcctgaccaacatggagaaaccccatctctactaaaaatacaaaattagccacacatggtggtgcatgcctgtaatcccagctacttgggaggctgaggcaggagaattgcttgaacacgggaggtggaggttgtggtgagctgagatagcgccattgcactccagtctgggcaacaagagtgaaactctgtctcaaaaaaaaaaaagggggggggtccaggttaaaagccatcgtgtgtgtgtgtgtgtgcacgcatgcatgcatgtgcatgtgtgtgttgcttcaaatgcctaaaatgtccaaaccttcttaatttgatgcaattcagagaaactcaaaacatacaaaagttgtgttccctcatgcaagaatgttgaaaaaaaaagtcttcttactattagcagtgccaggtatacaatttcagattctgaagctcctaagtaatccatggaatcaggagaaatctgtaaaatgagcagtaagtgtattcaggtgaaccttctttatttattcatggaatttatcccacttaagataaactgatgcctattcaatggccttacaaccattcgacctgatgctcccttgggtatcatgtaaaagttaatttcggactgtgcagtatgtcttctttgcttccagtgtgtctctaggccgggatgcctttgtatgtaacactgtgagtcagcaggagttgctctgttaggagaatcctgggctggtgctggcaggatcctttgaagcaatgccaagtctgtcttaagacaaaccctctcccctaaccttacctgtatttctgtcttcatttgtgctcttccctcgattatgcccccaagggccctggaatctttatattgctcttgccctcttacagccacttttgagagtaattatgacaatcttttcaaactgaagacaaagttcttcccctagagtttcacacgtatacatataagtgcatttttccaacattccccactcttttgcaaataaaaggtaaaaggacaattttgtttcttgagctatatttaccaacaagtttcctgagcaattttaaacgctttgcagtagatttctaactatcacagccatccaccatctagaaaagatgacttttccacattggatgatgtgcacgaccttgacatcatttcaaatgattttgttttcttaggtgccccagttgcccactttcaataattgcacctcatccaaactgaacctctggctcccagatctctactctctctgctgatactatatttttttttatgggacagagttttgttctgttgcccaggctggagtgcagtggcatgatcttggctcactacaacctctgcctcctgggttcaagcaattctcctgcctcagcttcccgagtagtttggattacaggcacccaataccatgccctgctaatttttgtatttttagtagagatggggtttcaccatgttggccaggctggtctcgaactccagacctcaggtgattcacctgcctcggcctcccaaagtgctgggattacaggcatgagccaccgcacctggcctctgccagtacattttagttttttggcatccttatgctagtgttcttactccataatttggaattggagaacctctaacccaccaactccttttccactgtccataatcaccctcatgtccttaacttcattttctagcttagaatccattatatcttcaattcctttttatatagaactactgctcacatattcttttctttgtcaaatttgcctgccaagtgtccaaccctgattgaacccaactctctgcctttcctaaactgcatttaaaagcaggctgtaataagagaaactctctactttgctgacttcgctgaaaagtagggcagagggtcttcggcactgtctgtccatcctaatgacctacgttctgaaatagtttttcacatctttttttctccaaatcccaagcccccttggccaagttaatgacttcccctcttactttcctaaaaaaggtagaatcagtcagaagagaatcatctcatctttctaccagcaaagccactaaactctctgcctcctatgttcatattctctgattataatttcatattaagcatgtggaatgtccctgcttttatggacagcaccccctccacttgtggactttacgctattttttctcacctattcatggacttgactcatgaggtaacctctatctctcttttccagcatgagtttctctaacatcagcatagtattttccttcttagcacagacaaaaatctaccctccctattcatttattcttgaatttttctgctacgctttttgccacatctcctagaaatatttgcctgtactcacagtcaccacatcctcccctcacattttctactaagttcactcttactgtgcttttgcattgacactttcattaaaatcgaccttgtgaagctcaccaatgacgttcgtgtagtcatagccaatggtctcttttcagttgtcatctttctagaactcacaatagcatttgatggtttaatcactccctccttcttgaaatgttctttattgccatctggcacacacccttatgagcgtctgagaagagcctccagcacacagaaggctaccatttttgttctcttatctccctggctccatctcaaatggattcgctggctcctcctcttcaccaactctaagttttggagttcaagatcatgtatttgctttccaatctctaaattttggagtttaaggtcatgtcattggccttctttttatttctatctctactcaccgcgtaggtcatattattgtcgcatggcttttcataccatttataaactgatcaatctcaaatatctagctttaacccccatctccacacaccctgacacattgaattcctgactcatgtatctaactggctacttgacatttctcaaacctaacatatccaaaacttaacaaaaaaggggcatctctttggcctcccagtagggttcccagcagtgagagttatcatgagaactaaacttccactctcctggagttgcctttgacttgtcataaaccaaagctggcttcctactgaatcagaacatgccccttatccatgcgtggcaagagaactgactttccaaagacagagacttttaaactttgcacagctgaggactctatctatatttttgcaatattcatggctttctcaaatgaccacacatttcatgaccctcagacagaagtggaactacttacctcagaaaaaatgaatagagagccaatcaatgtgaagggaggtattaacatggtgccaaaaaatagccctagaaatccatattcatttagatcagtagcaactatcgagaagatgaccacctaaaacaaatgcacagtatagcgtcattaaagtgtaccaatctgaattttaggatgttttctaagagggtgggaattcatttataaacgttgttattttcaatttcactccccaaaccagtatttatatcatttctttcctttgcaacatggaatttcatcacagttttgtatgggatttattattaatttcttaaaagacacagtgatgcttctcaatctcaatggcatacaaatcaggtgagactcttgctaaaatttagattctgataaagtgattatttattgtacattactctgcatttttctttttttcatttcacaatagttcatagacatccttttaggcttaggcaaaccagctatttgttttcttggcaattatttgtttgaatggatgtgcaaaattcaacaactttgccttcagaaaacatgtttttaatttttctgctcctatgaatgatggtctacataggtctttatgtatggacacttttagtctggaaggagagattctgaaaagtgtaactgcaggttaaaatttatgtgcacttaaaattttaacagttgctaacattttgtgtaaagtttgtgacatctattctacaaaccatgaattagagtacacgtcacaccacacatcattgacacaggaggtcatattatttattgtaggcatcgttgattttattgctgatattaagtaaataactttataattttaccatttaatatgacatttaccattggtttgggtaatttgtccctcttgtgttactattttctttatattaggtctttttaaggaactatatggtctttacttgacttatatagttttcttcctttagctgctaatactgaaccattattgtgttctgaaataaatcatacttgactatttttaaattattctttttttcttcttctttttgatggagtcttgccctgtcacccaagtgctggagtgcaatggcacaatctcagctcactgcaacctccacctctcaggttcaagcgattctcctgcctcagcctcccaagtagctgggattacaggcacatgccatcacgcccagctaatttttgtatttttagtaaagacggggtttcaccaagttggctaggctggtctcgaactcctgacctcaggtgatccacccacctcggcctcccaaagtgctaggattacaggcgtgagccattgagctcggccaaattattcttttgcaaacttatttctgtgtttgctttctttctatttagagagttgtctttaatttttccaagtgaatttatcaatgggttttcaaagctttttaaagttttattattaaatttatgcttgctttacaaaaggaactcttcaactttatgaattttttctattaaatatttaagtattctatgattcccaaagttatttgatcttcctaaatgtttaagtgaattcagtggtccttatcagtgcttttgcaatttttcttttcttgaattctttatttcctggttgtattaattttaaccctaagtggttcctctttcatgtggctgtaatttgttcctgggtattttttttcttttttttttttttttgttaaaaggattttattatttatttattcattttttggagcagttttagcttcacagcaaaattgagtggcaggttaagagatttctcatatacccactgccctcatacaggcacagcctccgccattattaacattccccaacaaagcagtacatttgttagaattgatgagccttattgacacatctttaacacccagagtccatagtttacattagagcttactcttgttgttggacattctataggtttggacaaatttttaattatatgtatccaccattatagtatcatacaggcctaaaaatcctcagtgatccacctattcatccctcactccctatgacccctggcaaccattgatcttttcactgtctccatagtttcgccttttccagaatgtcatttagttgtaatcatacagtgtgtagacttttcagattggcttctttcacttagtaatacgcatttaagtttcctccatgtcttttcgtgacttaagagcacatttctgtttacccaaaataatattccattgtctggatgtaacacagtttgtctattcaccatcttggacatcttggttgcttccaagttttgacaattataattaaagctgctataaacatcattgtgcaggtttttgtgtggaccaactaatatttttcagtagggcttttaaaacgtttacttccacattttatatttgattatgtctgacctttcctagaactgcaacttggtagatataattttggaagagagaaattccatttcctttccctcagatgtgtgaaaagtgacacatggaattgtaggagataaatctgaggcagttggaagttttctcttttatgattggttttcatttacttcttgggagcctttatttggaagtttcatatcataatgaatattgatcattccataacagttctttctaaatttaagaatttcttctattatatttttatacatagaattattttaaaagaattatacatatgtgtaacaatggatttgctacataaaaaatattaattattcttttgttggattggttttgtatttacatcttttcttattgttgtcttgctgattatggggattatcttaatcctttatttatatatgtaattagattttcagcctttttcagaattcattattaattctgaaattgtgctgatggttagtgtgtttatgtggatctaaaatttcttttttttttgtattcaagatgttttatcattgtgactctgagcttttgtcttattaaatgtgtattcttttaaaaaatctatagagaatgcttgaatggaagttttatttgttctgcattgttttggaatactttattaatttctttcttattgggaagtcatgcagcacctttttatcttggacatgtataacatatgtaggtctactgagatcttctatttgctctgataaagtgcttattatttctgaacaggctttctttcttggctgatattggtttatctttttattattattattattattatactttaagttttagggtacatgtgcacattgtgcaggttagttacatacgtatacatgtgccatgctggtgtgctgcacccactaactcgtcatctagcattaggtatatctcccaatgctatcccttccccctccccccaccccacaacagtccccagagtgtgatgttccccttcctgtgtccatgtgatctcattgttcaattcccacctatgagtgagaatatgcggtgtttggttttttgttcttgcaatagtttactgagaatgatggtttccaatttcatccatgtccctacaaaggacatgaactcatcattttttatggctgcatagtattccatggtgtatatgtgccacattttcttaatccagtctatcattgttggacatttgggttggttccaagtctttgctattgtgaataatgccgcaataaacatacgtgtgcatgtgtctttatagcagcatgatttatagtcctttgggtatatacgcagtaatgggatggctgggtcaaatggtatttctagttctagatccctgaggaatcgccacactgacttccacaatggttgaactcgtttatagtcccaccaacagtgtaaaagtgttcctgtttctccacatcctctccagcacctgttgtttcctgactttttaatgattgccattctaactggtgtgagatggtatctcattgtggttttgatttgcatttctctgatggccagtgatgatgagcattatttcatgtgttttttggctgcataaatgtcttcttttgagaagtgtctgttcatgtccttcgcccactttttgatggggttgtttgttttttctcgtaaatttgttggagttcattgtagattctggatattagccctttgtcagatgagtaggttgcgaaaattttctcccatgttgtaggttgcctgttcactctgatggtagtttcttttgctgtgcagaagctctttagtttaattagatcccatttgtcaattttggctttggttgccattgcttttggtgttttagacatgaagtccttgcccatgcctatgtcctgaatggtaatgcctaggttttcttctagggtttttacggttttaggtctaacgtttaagtctttaatccatcttgaattgatttttgtataaggtgtaaggaagggatccagtttcagctttctacatatggctagccagttttcccagcaccatttattaaatagggaatcctttccccattgcttgtttttctcatgtttgtcaaagatcagatagttatagataagcggcgttatttctgagggctctgttctgttccattgatctatatctctgttttggtaccagtaccatgctgttttggttactgtagccttgtagtatagtttgaagtcaggtagtgtgatgcctccagctttgttcttttggcttaggattgacttggtgatgtgggctcttttttggttccatatgaactttaaagtagttttttccaattctgtgaagaaaggcattggtagcttgatggggatggcattgaatctgtaaattaccttgggcagtatggccattttcacaatattgattcttcctacccatgagcatggaatgttcttccatttgtatcctcttttatttccttgagcagtggtttgtagttctccttgaagaggtccttcacatcccttgtaagttggattcctaggtattttattctctttgaagcaattgtgaatgggagttcactcatgatttggctctctgtttgtctgttgttgtataggaatgcttgtgatttttgtacattaattttgtatcctgagactttgctgaagttgcttatcagcttaaggagattttgggctgagacagtgggttttctagatatacaatcatgtcatctgcaaacagggacaatttgacttcctcttttcctaactgaataccctttatttccttctcctgcctaattgccctggccagaacgtctaacactatgttgaataggagtggtgagagagggcatccctgtcttgtgccagttttcaaagggaatgcttccagtttttgcccattcagtatgatattggctgtgggtttgtcatagataactcttattattttgaatgtcccatcaatacctaatttattgagagtttttagcatgcaaggttgttgaattttgtcaaaggccttttctgcatctattgagataatcatgtggtttttgtctttggctctgtttatatgctggattacatttattgatttgcgtatattgaaccagccttgcatcccagggatgaagcccacttgatcatggtggataagctttttgatgtgctgctggattcggtttgccagtattttattgaggatttttgcatcaatgtgcatcaaggatattggtctaaaattctcttttttggttgtgtctctgcccggctttggtatcagaatgatgctggcctcataaaatgaattagggaggattccctctttttctattgattggaatagtttcagaaggaatggtaccagttcctccttgtacctctggtagaattcggctgtgaatccatctggtcctggactctttttggttggtaagctattgattattgccacaatttcagatcctgttattggtctattcagagattcaacttctttctggtttagtcttgggagagtgtatgtgtcaaggaatttatccatttcttctagattttctagtttatttgtgtagaggtgtttgtagtattctctgatggtagtttgtatttctgtgggatcggtggtgatatcccctttatcattttttattgcatctatttgattcttctctctttttttctttattaatcttgctagcggtctatcaattttgttgatcctttcaaaaaaccagctcctggattcattaattttttgaagggtttttttgtgtctctatttccttcagttctgctctgattttagttatttcttgccttctgctagcttttgaatgtgtttgctcttgcttttctagttcttttaattgtgatgttagggtgtcaattttggatctttcctgctttctcttgtgggcatttagtgctataaatttccctctacacactgctttgaatgcgtcccagagattctggtatgttgtgtctttgttctcgttggtttcaaagaacatctttatttctgccttcatttcgttatgtacccagtagtcattcaggagcaggttgttcagtttccatgtagttgagcggttttgagtgagattcttaatcctgagttctagtttgattgcactgtggtctgagagatagtttgttataatttctgttcttttacatttgctgaggagagctttacttccaattatgtggtcaattttggaataggtgtggtgtggtgctgaaaaaaatgtattctgttgatttggggtggagagttctgtagatgtctattaggtccgcttggtgcagggctgagttcaattcctgggtatccttgttgactttctgtctcgttgatctgtctaatgttgacagtggggtgttaaagtctcccattattattgtgtgggagtctaagtctctttgtaggtcactcaggacttgctttatgaatctgggtgctcctgtattgggtgcatatatatttaggatagttagctcttcttgttgaattgatccctttaccattatgtaatggccttctttgtctcttttgatctttgttggtttaaagtctgttttatcagagactaggattgcaacccctgcctttttttgttttccatttgcttggtagatcttcctccatccttttattttgagcctatgtgggtctctgcatgtgagataggtttcctgaatacagcacactgatgggtcttgactctttatccagtttgccagtctgtgtcttttaattggagcatttagtccatttacatttaaagttaatagtgttatgtgtgaatttggtcctgtcattatgatgttagctggttattttgctcgttagttgatgcagtttcttcctagtctcgatggtctttacattttggcatgattttgcagaggctggtaccagttgttcctttccatatttagcacttccttcaggagctcttttagggcaggcctggtggtgacaaaatctctcagcatttgcttgtctgtaaaggattttatttctccttcacttatgaagcttagtttggctggatatgaaattctgggttgaaaattcttttctttaagaatgttgaatattggcccccactctcttctggcttgtagggtttctgccgagagatccactgttagtctgatgggcttccctttgagggtaacccgacctttctctctggctgcccttaacattttttccttcatttcaactttggtgaatctgacaattatgtgtcttggagttgctcttctcgaggagtatctttgtggcgttctctgtatttcctgaatctgaacgttggcctgccttgctagattggggaaattctcctggatactatcctgcagagtgttttccaacttggttccattctccccatcactttcaggtacaccaatcagacgtagatttggtcttttcacatagtcccatatttcttggaggttttgctgatttctttttattcttttttctctaaacttcccttctcgcttcatttcattcatttcatcttccatcgctgataccctttcttccagttgatcacgtgggctcctgaggcttctgcattcttcacgtagttctcgagccttggttttcagctctatcagctcctttaagcacttctctgtattcgttattctagttatactttcttctaaatttttttcaaagttttcaacttctttgcctttggtttgcatgtcttcccgtagctcagagtaatttgatcgtctgaagccttcttctctcagcttgtcaaagtcattctccatccagctttgttccgttgctggtgaggagctgcactcctttggaggaggagaggcgctctgatttttagagtttccagtttttctgttctgttttttccccatctttgtggttttatctacttttggtctttgatgatggtgatgtacagatggggtttttggtgtggatgtcctttctgtttgttagttttccttctaacggacaggaccctgagctgcaggtctgttggagtaccctgcagtgtgaggtgtcagtgtgcccctgctggagggtgcctcccagttaggctgctcaggggtcagggacccacttgaggaggcagtctgcccgttctcagatctccagctgcgtactgggagaaccactgctttcttcaaagctgtcagacagggacatttaagtctgcagaggttactgctgtctttttgtttgtctgtgccctgcccccagaggtggagcctacagaggcaggtaggcctccttgagctgtggtgggctccacccagttcgagcttcccagctgctttgtttacctaagcaagcctgggcaatggcaggcgcccctcccccagcctcgctgccgccttgcagtttgatctcagactgctgtgctagcaatcagcgagactccgtgggcgtaggaccctctgagccaggtgggggatataatctcgtggtgcgccgttttttaagcccgtcggaaaagtgcagtattcgggtgggagtgacccgattttcccgattttccaggtgccgtctgtcacccctttctttgattaagaaagggaactccctgaccccttgcgcttcccgagtgaggcaatgcctcgccctgcttcggctcgtgcatggtgcgcgcacccactgacctgcgcccactgtctggcactccctagtgagatgaacccgctacctcagatggaaatgcagaaatcacccgtcttctgcgtcgctcaggctgggagctgtagaccggagctgttcctattcggccatcttggctcgtccctcctggcttatctttttctctgagtaatattttgatgtagggccttgctttctatcagtacctttgaagcctggaggcctagatgcatacagcgtcctcagcttaggctgtgtgtagccttattgctttctcctttaggtcatgtccagtgttctgcaccagttttcaccctacctagtaggcagtgaatctcattgtcaaggggtgggcaccctattagacgttgggccacagtccaattcagtccagagccctgtaaaatagcaaacctcagcatcccacctctccaggtgaagcattcttctctcaagggtttttatttacctgtgctaggatgttaactcagtcactcatgtatacctttttagagccaattattagcattttatcaactaagttttcctcatcaaaattgcttgttgaggatggaagtagacttaggaaaagctccgtatcagggacttcgttccttggccaccacatttccacttcggttttctttgtttcgttctaccctgctctacgaacaaagaggttctctgtctacatacctaatcaaatataacttgtatgatgtttaatttaaatttctacatgctggcttatttttttttccaactaatcttctagttctgaaacaggtgatttaagttccacttggatctttggagaggattgtgtgatgtattttgctgttgtgtattatttgctaaacaaataaggagacttccattttctgcatggattttgcattttgtcaacatatttctttccttatttaagactttaggtctagaacttgacttcatctgctatttgggcagccatttctaatttcctcattttaaaaatgcctgttaagtcattgcccatgacttagatgtgtttattttaacaaacatatagctaatttttttaacccagtctggaagtcattgtcttttcttcttattttctaatttgtatttactcatggtattttattttagtttctttcaaatgtgaggcatcccccatatcatcccctggaattctcatactctgtgggtggttccacctctttgaaaaactgtttggcaagatcaactaaagttgaacataaagttgaatacattgtgacctagtaattccactgctaggtttacatctcaagatatacacacacatgcaacaaaagacatacaagaacaagaaagttcatggcagtgttatttatagcagttcaaaacaagaagccacttgaatgtccatcaacaatgaataaataaattatagcacattcatcagtagactattacagcaatgaaaaggaataaactattctggttgttatcaaatgcaacagcatggatgattctaaataacctattgtcgattatatacagatatataattatgccttctacatgattccatttttattaagttcagaaactggctacattacctatgttaatataataggagtaatgatttttacaaggaggagggaaattggaaatgggatggaagggggcttctagggttctagtattgttctatttattgatgtacctggtagttttggggaagtgctcaaaaaaactaccagacacatcaataaatagaacattactaggtgtgcttaaaatgtgtgaacttttctataatgtaggctatacttttcaactaaaatttattttgaaaagatctcattggatattatatagaaaatagttcacaggaggcaagagtagaaacagagagaccagttacagatatgttgcgctactctaggtgacagagtatgaaagcataggcaatggatagagcagtgaagttgggacacatcaggcagactgggaaatgtctagagtttaaatgacatgcatgtggattgaatgaaggaaaaaatggggcgtgatcaaggatgattccaaacttttagaatgagaaaatagctaggtggattctgctgcaataatgtaatctattcagaaatgatgaaggccaggcacggtggctcacgcctgtaatcccagcactttgggtgggtcatgaggtcaggagttcatgaccagcctggccaatatggtgaaaccccgtctctactaaaaatacaaaaattagccgggtgtggtggcgcacacctgtaatcctagctactcaggaggctgaggcaggagaattgcttgaacatgggaggcggaggttgcagtgagctgagatcattccactgcactccagcctgggcgacagagcgagactctgtctcagaaagaaaaagaaaaaaagaaatgatgaagaataagattgaggtgacaattacatttccggtatgtgatcactaaggtcttctttaaatattcaggtgaaattgcaagtgaattgctagaagcagaagtctctactcaggggagaagttagacctggagatatgtttgaagagcatagtttatagataacatacactcactcatagagtagactttaaatagtactttgattatcttagaagaattaaaattttctagagagcaataataatttgccactctgcttagcacaaagattaaacatgttcttggatttatgaaaaatggtaaaataataggtagtatatgcatactcacaattaagaagaaaaatgaccaaatgccactattttttctcccattgcgaaaaatgaatgaaatcacatatgtcaagaaaacaagagatgagacatagccaatactacacaggatctgaaaacagaaatgttaaggtccaataaggtaaatactatctagaagagtactcatatttactcttcaattttccaaaactatgcaatagcacaggtaatttgaagttctttggtttaagattaatgatattactgcattcatgaaaaaatagtctaataaaaccatttcaaaattgctgccacttacttgaattaacaggttttgaattataaatataatctcctctgggctaaaaatataatccattatttgcattagcaggaggatcaaaaagtacagggaaacatccaccagtgcttggccaaaccagtatgcagaagggtagaggcctgaaatccgtagctgggaatgagcttttttctgataaagaaatagaagaatcatcaaaaggttctgaagagctgaagtttgggaaattgcaaatatacagtcatgaaagcattcatttttgcttcgccttttagaaatattatcctgatttagcaaatgataccaccactcgccacacccttgttcagaggcattgataatgctgcaagccacgtcattatttcattgtctaaagggaaaacgcaccaacataactagctaatgttatgtcacagaatgattgggcatggcctcagtgagaagacatcttttctttgcaagactattctttccttcgacgtgaaaacttgcacattgcacaaaggttcaacagaagtaggattaccatttcctgtaagacacttaaaatttatgctgaatgtaaacagtgcatttatcattggcattttattttgggtctaagaaatggtcctctagttgatttcatttaaaaactgtttaggttggaatcggcaagactgcctttaaaatgttgcactattcttattgtcttgccgtaagtcatatttttcatcatcacactgtgaaaactggtgagtggattttgctattgtgaccactataagtcacattattgcagtgattgtcataacacaaggtcttgaaaatgtgacctggactattttaaacagtaaagcataaaggcaattaaaatttcaaatctaaaattgagtctatataaggagattcattagcaaaaaactggaatgcaaataattctggaaaggagagtacatctggaaggaagtaggaaagaggatgatagtgaggaccgttagagagcttgctattttctattcatcaacttatttaatatatatttacagaatgtataccgtatggctggcttcatattggtcacggggcacttataaatttaagttgcaggggaagaggaaatagaggcaataggcaaataaatatagtgatagctacctaagtaaaattgtacatgtgttaagaagaattcagggttgtattacagcctttcaaagagaaacgaattgtaactcgggggtcaggtcagagaaggttcccttgtgaagtcatgagttagggtatgggcagtgaataggatatatctgggtgaccggtcagaaagcactgtgggcagagagaacagcaggagagaagacccttccgtggaaagaggctgatgttctgggaagctagaaagaagccagtgtggctggagcatggttatcaaggtgtcagtagcatcagattaagggagtaagatacacctgggcccagatcactcatggctttcagacaatggcaaggatttcaatcctgctccttggtatgacgagaaaccattgaagagatttagacagagaattaacatggtcagctttgtgtttttaaggtattactctgtcacactggatgaaaaatagagacgactaatatggacttatagggtggctgttgtgctcatccagaagagagatgatgatggctctggctggtgttttgtaggagagatggaggaaaactttctagaaagattccataaatatttcagaagtatattccgtgacttcaccattagccagctatgaagatgagagagaaagaaagacattgacatcgtggggttgccagttaaatttgaattttagataaataactttttgagtataaatatgtcccatgcaatatctggaaaatacttatactaaaaaaattcattgtttctcatattaaatcttaactgggtgtctgtaattttatttgcttaattctggcatcctaacaaaaatagctcttaggtttcagtcaagagtaaaagaatgaaaggtgatccattatttatagagatgagtaacaacgaagtacgtaaaatttagagaaaaacattcctgtgctgatgatgtttattcctagttgacaggagacagttaattaaaaaaaaaaaaaagcaaaggttcagataatgataagtaccatgcatagatttttaagataagctcatataatagttatgggaaatctatttcagactggttaagcagagaaggggtcttggctgaaatacttaaatatttgcgctgagatctgaattacaaaaaagccagctgtagaaagaacagaagaaagagcattccagccagaagaaatggccaatgtaaaggcccagatgatattggcatatttgagaaccagaaggaaaagtggggtagctagaggaggagagtacaaggaggaaaggtagagagataaacaagagacaaatgagggagggagggctctgccagacaacataaataattagaatttaattctacctgcaaagagaaactgccggggttgttaaataaggtaatgagatgatctaatttaaacttctgaaagtttgctctggttgtatgaaaggaattaattgcaaataaggaaacctatgggtaactcttgcagtggtttaggcaaggaatgatgatgacttagaccacgaagaaaatagtggagagggagagaaatggatgggtttgaagtagaacttaaaagaatttccaatggattaaataaaggagataaagagacaacgataatgcgaaaattttatgctagagcaactgtagacaatagtgccatttgctaaaacaggaaaatcatgaagtgagcacaactggttaggaaaataaaaagttttattttgcccatgtgtgaaatatctattactcagctatatggtaatatcacataggccactgtacatatagaagtcaagaattctggaactagctgaaaagggccctagaactaaagcctggacatttagacatcaagcattaacatttatgggaaagttactatatggcaagtatggttctaagtaactcattggtattatatcaccacatcctcacagaaacctatttcaaatagatgtaactagtatctcattttatagacgatcaaaatgaggcatagagtgattaagtaacttttgagattcatgcagcttgacaatggaaatattgagatttgaactcagaggagtttaccccaaaaaaagtgtgagaaagagtgacaagagcaggaggaaaaagacagtgaatgtgtggtcttataaaagtaaaggaaaaatagtattttgtgtttcttatgggagaagtcactaaagatagggacagtttaagagcagaataaataaaaattaagtcaagcccttcaaaaacatgtcctgagcatcagtggatgatgacaaggacatgaagacatgggagagtagcagatagactctgttacaggctcctcgaattttattttttaaaaactcacaaaaatggagctttaaatggacaatattttccaacaacaagtcaaagtgctgtggtgagttggtcagggcttttaaactgagtagctttagcaccatctggaaagtagaaaccaccattgagagatgagatgtgattatgtctgtgagtaagtcttataagtcaaattttaagtgataaacatttgaaagttgtcattccctgttagcagatgacatctaagctgtccttcctgaggtctcacatttgtttcagaaagatagcattttcttcatatttgacaattattattaaagtgcttgattattcattgcatcaagtacaaaaattagatttaccacttgcatgtaaatttatagtcgtaagggtgtgggaagggttctctagatataaaaaacatgtgaagactttaactcttcttactttgtagtcaccaatgctgctcattgcaatgtatggagtgaaagaggctgccatcggtatccagaagaaggtgttacttcggtacccatactcataatccatatgctcctgaaatcatgtggaacatggtgagctgatggcgattgggcatctgtttcatctgtactttcttaactaaatcactcaaataaatgaattgagctgatcactcaaagtgcttctcaaggtcctatatgcaacttcttacccacattcattttcaatcctgtattgcagcaactaggaccttctgaacacgtagcctgatttacttatgaagaagcaaattcaaccaagtgatacgaattgtctaaggtcatacagttaataacttgtaaggtaggcatgaaacgtcttttctctgactttatggttacaatcttacatgcattgcttatatacatcaaggctgatgttttaagagacaatagagattgtggactgtcagtggaggggctaggagaaaaatggtcagcacgccctccatgttaggcactatgttaaaaaaaaaaatcaaaaccctgtacatattaaagaggatcttgagttttgctacaagccttaattttgaaaaaaaaatttaaaatttgtgggtacatagtagatgtatatatttatggggtacatgagatgttttgacacaggcatgcaatgtgaagtaagcacatcatggagaatggggtatccataccctcaagcatttatcctttgcgttacaaacaatccaattatactcttttagttatttttaagtatatgattaaattattattgactagagtcaccctgttgtgctataaaatactaggtcttattcattctttctgtatctattttttgtacctattaaccattcccactccctttcccagcctctggtaaccatcatttgactacgtccatgagttcaactgttttaattttcagatcccacaaataaatgagaacatgcaatgtgtgtctttctgtgcctggcttattttatttagcatagtgatctccagttccatctacgttgttgcaaatgacaggttttcattcctttttatggctgaatagtactccattgtgtatatgtacctcattttctttatccattcatctgttgatggacacttaggtttcttccaaatcttggctattgtgaacagtgctgtaacaaacatgagagtgtggatatctctttgatatacttatttccttttgtgggggtagcaaaggtgagattgatggattgtatggtagtacaaaccttaatttgatctatcatcagttacctcactacattgcaagtcatctggtatgatgagttttgaagtttctttacttctctgttctcttactccctcctaaaactcagcacccctctgagacattacagcatataaaacttgcttgtctaaagatgtgtttgtgtagataaggccctgggaggggaaaaaagggtgccaaagactacatcccccatctcatatctttgcctgtggataccattgttgattttcctgatttggaagacctctgggggaggaaaaaatcacaattcatcttgacaaccagcttccttactcatgactgggttcataaatgacatattatgtctgtgttagatcatatccacccacagtcagagtttgatgtgactcagcctgacagggtccttcctaagctgaaagacactggatgcctcctgggtagtttggccgggtgatgacttgcaggaatggctggatgggagtgctgtaggacactccgatagatgataaaaattattgagagggatcagcagcaagacctgagctacagtgagcctggtactttactttaggatcaagtggaataggcttacaaaattgtaacagagaatgccaggagctgggtggggaaaccagaggtggcaattcaaagagataatttgtctacctatgaactcaaggtcagctgggctggtgggtagccaatattctgtagtgaagacatctttttaaaggtgggaattcaggtcacttgctcattcttgggaacatcctattctttgtcatccagataattggctagcctactcaaatataatagataatgaaacacagtgacacctcagtgggctacagtttcctcagctgtctaataataacacaagttgagaatccctaatctgaaaatctgaaatctgaaatgctccaaaattcaaaactctttgagtgccaacatgacactacaagtggaaaattccatacctgacctcatgtgaagggtcacattcaaaacataggcacacaacacagagtttattaaaaacattgaataaaaatatcttcaggctctgtgtaaaaggtgcacatgaaacaaacgaatttcatgtttagacttgggtcccatccccaatatatctcattatgtaaatgcaaatattccaaaatctgaaaaaatcgagaatccgaaacacttctggtcccaaacgtttcagataagggatgctcaatctataataggaatagtaacaactatttcaaagtctgcttgggacatttaaacatgctaatacatataaattacatgggaaatatctggttttgtccaagaaatttttgaaggaagcaggactgctgaaacgtggcttgaaaaaaacaatggtatgatgtgctttggagaagacagggcaatctccttcacatccccaaacctctgtagctttcaggcagcatgcaagaagcactcaacagctctcatagctctttctgaggaagcacagaggttaaagcaaggcagaagttgttgaattacctggaggatggacacatcaaacaatgaacaatgtagactggagaaagtttgacagtatggactttcctgcagcagcctaaagagactctgcaaccctgggtgtgtcatcacctacagaagggtctggggccaagctaaacaccaccccaagacaattacatgggtcacctgggctgtggtgaccacatacgtagaaactgctagcaactagagaaagcatgatgtctccccagcaccagttccataggaagagctccagctctccattcttccattctgcctccagcatagcagtgctttactcagaaggggagggaaaggggattgtctgagagctaggacaccctcccttttctattccatgtgttagactgcaaagggaaatggaagagcaaatcacaccacaactacccaccctcttccatgccccttaggccacaatttgaccctgcaaagtttaaattgaatagaaaattgaagtttgggactgcactagaatgatccttcataacaaaaagtaaccaagaagctatagaatatggccagggtgtcattttcaccagacgaagtgtgtttcaacataacaagatgaaagaggtgacctgaagacatagaagtgcacacccacatctctaccccagatcttctgcctctgggcatctaagcaggcctgagaaattagattttaaacaagaactgccttagttctcattcagccagtccccagatctaataaagctgaacattatttaatggaaacttcttttgatgcatcccaagaaaaatagttttaatagcaataataatgagaaatataatttactgagcacctgcagttgtcctattttaggtgcctcatcactcgttcctacaataactggtccaacttagccaggtgctcacattgcctcatttacttcttaagaaacttttgtgataaagtctttaatctgttttttgtaaattgatgacctatagcctgtagaagtcaagttgcttaagaaggtcacatagtctgacctttaagtctgtttcaacaatgtcccactacctagggccacagatggtgacagatctagaccaaaagtcataatgagttgtatttttctgttgctctattgacaccaagtcatctgaataaggttataatattgtgtggtcaattctaaattgtgtgtgtgtgtgtgtgtgtgtgtgttataatgttgcgtggtcatttctaaattgtgtgtgtgtatgtatattacatatacagtgatttatatatatataaaatattgcacacagatttatatgtgtgtgtgtatatatatatatatatatatacacacacacacacacacacaagtttaagaatagattcacaaaaagtaatataacattattttagcatttcaagaattttcttgaaaacttatcatggcacagtataaatgagatataattatacttacttcaaaaaatgtgcttctgtcagtctgaatgtgttctgacgaattaaaaattccaagtagtccattgctaatgacatccaggaggacaggaaagcaattcagccgttttgtattacatgctattgaaaatctgtgatcctgaaatacaacaagtaccaattcgaagtcttcataaagcaaagacaaaatttaatgagtgaacatgttagaaaatcattcaagttactgataatataataagtcccaagcactgaatgtgattaatatcactatcactcataatatttgattaattcttaagtatacttaaagaatccggtattttggtttctacccaccataacatcaaccatgtggctatttatgcccaaacatcacaaaacaaaatacttcaaatgatatttagcagcaacactacgaaactccatagtgcaacctcagtttaacctggctatagactttgtttcaaaatgtgacacattcattttataagtatataatgtttggatacttgagaaataggaggcaggcagaaagttgtaatgaaagtataggttttcataaatcctgtgcttacttgtaaagtctcccttaaaataacgtgtgtgtgtgtgtgtataatgtgattatttttccctcagagaaaaatataagtaaattcattatccatattgcccaaaatgtgggcaagctttgagaacacatttttgcaatcataaataaatcaagtgtattgtatttaacctaattacctaaagcaatgtttattgatgttaaaactattttactgagcatactgaaaaataaacttaagatataatgagaactatcttgaaggtaatttcttactttatttttggcatggagtttattcctgaaaattaactgtgacaaattacaaatggccacacttcgtgacacctaacagctatgatttatgcatttaacataattatctcatcttttcaatttgcctactgtagagatctctgactcaaattcctacagggtctaggcaggtgatatgaatgagcaaagcagtatgcagacatagaaatcagaaaagcaaaggccaagtctacattgggcagttgttctcagttccaactgagaatgagatttaatttaattattggaatggaatccaattgataataacgatctaaataaattattatagcagtgcattcaacttaatcaggaataaaatcaaataaatttcatttcatattgccatgctgaaggctatggggaaataattgtagtccagcttcttctataaaaatgagaactatcccatttgtttgtgtgaaattggcctttcattcagctgatatgaattattcaaattgtacacccatagtccacctttggtgaaatgcagcaactggagtccagcataccttttcatcacctgacacaatgatagcaccattgtaagatgggtcatctgtgccatttctagttccaaaggcatccacttctatagctatgttctgtcgcctcagtgaatgtaaaaagttatcaatggttgaccctacatgaaggcaaagattaaaggaagcaaaaatgaaataaaacaatagtcaagtaatattaaaaatacattacatcacacaaagcatatcacacaaaaggactgtctaaggcttttcttaaaaaagcagaattgatgttctggtacaacaatccagtctaacatcataggtatgacaaggttactttatctagagcctaggcatttcattataatttctattagtatagaaataagaattgctgttaacattataatccttgaagctattaatagtctatctatctttttaaatttgaaacatttttttccagagcccagcacagcacagatttacaaaatgatacacaaagacctcagaggtgagtcaatgatttacctccctacctcctctttagttgctttgtgcaacaaacattaaggttaagtaaacttgcagaatctatttctaaaacaaactctcccatgtcgtatttttcattttttaatttattttctgtttggcctcatatatgctttctaaaacatacagagtttatttttttcttggctgttcatgttttttggggggaatctctcaacaagaacaacatttaacagctgcatttcagccccatgttcacctgtcttattgatgaccagtaaatgggtcagaggatcctgtggttgttgtcctggtgagaggaagtatgtatttggagacagttcccacgggtaacttttctgatatgactcgtagaatagatgttccaaaagttgagggataaagctaataccaaaaagcaataatctatgcagaggaaaatgtaaaagaaaaaaataattttagcaacttttgtgggtttttaagtttgaaggtataatgaatataataacagaaataaattataatcaataaccaaacatttgaatcatactttgccccacttccttgtttctaaaatgagatgggtcatatgtatctacctttagtcttttgctctctctcaagtgccaagcaggacaccttggcttcgggtttatgaagtctgtggattatgactcttaaatctctcttcacaatccctaactcattgccttatttcagtcatgcatttctttctttttctgcactactgaaattggcatatcactaacacccatacttactacactctgaactttatcccatcctgtttccaatttctgtaaattacagcattttctcattcccctgggcaccaagagctcaatcattttccacccatttctctcccttaagtttattttctaatatttggaaattcatatctatcatagcatctttattgcttgcctccaaaccttgttctctcttcctcttcttaagttgggcttttattaactccttcctgactcttcaatattgttctaaatgtttgttttcattgtctccatattctaccattaccaaacaattttgcacaattacccaattaagcttcttaacattttgttgacattatgtcaattacctattgaaaataaaaaatacagtcttaatacttccttagtattcataaaatgcaaactccttagctctttgaatatatttcaaaaatatttttactttttcatacactttatgttgcaattaactcagattaatagttctttagatttctcatgtatccccatattcagtactactccctcagcctgaatttccattctcctctctcttcttcaaaatctccctgagctttctattttgacataatctccctcctactaaatgccatagttcacaggattgtctgttatttactatatgtctaatcaccctcaagggtggactgtcatgtctgatttcttttgatatatgttataatcacttaataatagagtgttgcatagaggtgctcactaatatttttggatgaatgaatgttctcagtgaatgagtgttcctgatgataaggctgaagctctgggggtacatgtgaaccttatagtgggttccagatatgatcgtgaagccaaggcagactcttttatagagcctcaagactgtaacatggaaattgtgcctaagtttccagtcttccaactacaacattaactctaacccaagtttccagtcttccaactacagcattaactctaacccaagtttccagcctggtgttctgccttgtggatttcagatttgccaagccccacaattacataatgaaattccttaaagtaagtatgtttatatatgtatatcctattggtttcatttccctggggaaccctgacagctacagattttgataccttgggaaaagaggaaatgggtctttaggatgggacctaagtactaatatccacgtgcttttgaagaactacttcaacccattggtaaaaacaaaatctgtgtgaaatttaaaaaaagaacaatcccaacccgtatctgttttaattatatatccacatgattaaaaatggtttctttaattaaaaaatgatttctttgtttaaaagacaatgtgcatttactgaaatttattttatctgagtttcttttatgttttgctctcttaaatttatttttagttcacagacaaaacaaatctgaaacactcagatactcacatagtccacaggctttttctttctttctttaactttaggaagcgaacttttgctattgcacagacctgctgcctccagagcgccacgccactgattgttttccttgtttcgtggaaggaagacaaaacttgttccagctcaacaaggcttcctatatcttttgccccatcagtttgtaattgtccccaaattccaatatctaaaacataagatcaatattttataaagtgccattttagttatgcattatttagcttttcctatgataaattttcctacaaaggtgtcaaagttaccctcttgggccaagatacaagtaatctaatgtatgacattattagagcaactattgaagaaatgggaaagaagcagaaagtattgatataataaaagaaaatcttgtgttttctgattttaaacgtcctctgtctgcagctttataggactttatttattctaaggaaatcaatgaaaaaaaactcattaagaaatctatttgttgtaaaagataaaccacttagtatttctgaccaaggtaggagagttagtatatacagaaacccctcctctacccttcaagaacataaaaatgggagaaacgatatttttaaaatataaccatggttaaaagcaagataaaagttacctgttttgaggtgaagcctagagaaaatgactaactctggctactagaaagctataaaatatgtacatacattaaaatttagtataacactaaaaaagtaacaagtatataacttcaaaaatgaataagagaggaaaaggaggattaaagaaaaatgcttgatcaatccaaaaagacccccagaaaattgcaaaaatgaaaataaagagcacagtaaagagtaaacaccataagatgatagtgaaccagtaaaaaaaattatcttagcagcaataagagagaaaagacagaatgcttcccaaggaataaagatgagacagagagcaaactttccaaaagcaacaactaaatcccagatacattggaataatatcactgaaatgctaccagaaaagtagcatttctgtgaactctaattttcttttctctatagcatgtatattcaggtaatatcataccatatatttattgtttgctgcataaggaactagtgttgtacattgctatattccacagagatatatttcttctctaagttttcccaagacaagcctgaatcatagcaccaacaaaagtatataatctcatcatttgggcatattttcaagataaaatactgcacacaaagataaaatctttctttcgtccttccttccttccttcctttctttctttctccctttctttctctttcttattttttcttacctgattcatcaatagttgattttccttctaatttcagaaacacctcattcaaagttgttatggaaacaccataatcctcaatgccttggttagaacatctatcaagatccctgtaaagttctaaaagtggatacaaaaacagattataagaatataatttataatgagaaccatatttctcaaaaatgtaaaatattggtaataggccaaatgtactaatcagaaacaaaattgtgatacagatgatctcatttctaaaatgatccatatagtatgttacttttcatgtctttttgagatcaaagtctaatctaaacatttattttttcactcttaggaaactacctatgtgttttttgaaaaacatattttaatatattttttaaaatttatttttgttatattacagggagtgtttaattctcaatttcaactaattaaaaaaatattttccagagaatagagatttgtgctttcttgttgagattaattattagagaattataataacaaatgtaaaagaactaatgtttatagaaataattaagtatagactctttgatagtttaaaaacatgtaaaatttctatttttttttttttgagacagagtcttgctttgttgtccaggctggaatgcagtggctcaattttggttcactgcaacctgcacctcccagattcaagtgatcctcctgcttcagcctcccgagtagctgggattacaggtgcacaacaccacgcctggctaattttgtgtgtgtgtgtgtgtgtgtgtgtatgtgtgtgtgtgtgtgtgcgcgcgtttagtagagatggagtttcaccatgttggccaagcttgtcttgaactcctgacctcaagtgatccgcctgcctcagcctcccaaagggctgggattacaggcatgggccaccgcgcccagcccataaatatgtaaagtttttaaaaggacaaaatatgtatgtaactttgcacctcctctctctgtctctctctccctctctctttcaacttctgaccatggtgtgaaaattcaggaaaactgaaaggtggataaaagataaactaattcaatattgggataaattaaagacttcaatcttaattatgtgttggacaaagaaaaatagagatgtagtcaaaatttctaatgagtccttaaacttacctaagggttaattgtttttcagtctttctccaaatttctcatccactttggaatgcatttaataagcaatcagctaaaactttgctgtgtgatcttcacaaagatttctgtttttataaggatacatatctcaaagatattgtgtatgcactgtgaaccattatttcacttattctaagagatatatttcatcatcttttaatatatctgaaataataatggatcttaaatgatagtagatcatattttaaatggtagcattatttctttgtgtttctttcttagtggtacatcctgtagttgagggcttcttacacctgatgaaataccataggttctgcatgtcaggtattgttccagtgctttatttatatttaatatttcaatacatttgaaggtattaaatcatttaatcctcataacaaccctagagtactattttaattttcttttcacaagtgaggaaactgagatacagaatagtactataacctgttaaggattatagagctaataatagcatagctggtgtttgaatctagactggctctagcattgagtttcaatctctgcactttattgtctggttctgtgtttctttatggaccaaggttatgtcatgcttattgattcaagcatgcagcaatggccccggtataatttcttgaacttgatatggcaaacacatttttacagagtaaacttaagaagcattctacctcaaaacgcttaggaagtgaaacagtgcattgggagataccatagaaaagtaataacaccagtagttctccaagcttctgtgtttgcagcaaagttgtacattgaagtgtttggcagaatgcacgccaatccaagttatgttcaataacttggattatatcagtatgtgctggtgtttctaaaacaacctatttattgtgtacaattctttcagctcttcttcgatagtctgccactgtatttatatacctgttcctgccctgaccacactctctcattcattactgaaacaaattttccaaataattcttattttatcttgctgctagcctacgcctcttaattgcacttaattgacttgaagcatatttaacatctacatgccttggtttactcataagtagcatatggataatactaaggggtaatattataagtgaccttggagttgggaatattaaatgagtaaacgcattgtgccattcatctagcaagcattaaaactagccatcattcttatcaccactgttattgttaataacaccattccaaaaccattctgtcatctttacattttgttacctggaaatttgtttgtcctttccaaaggcaaaatatatacaagtttttcttcactttgtgctgtcaatttggcatcagagatgtgctgcttaaccagtgatgttatactctctggatcacacctttcattcagatgcaaactaacatttaaaaagaataaaagttatttttatccaactgtgtctataaaacaatttcctaattatgtagtatgtgcttgtcactttattaatatttatgagacaaaaaaatgtgtagtttactggacaaagtaagatgtaaaactactaataaagtccaaaccattaaatctatgcaacatggcagaagaattagtataagggatgattagagtgggaagaggtaactcaaggactcttatttggagaaatgagatattaagccagatcttgcctggggtgaggtaaagggaaatgtttaatttgtcagcatctactcaaaaacccaacctcccaaccttgagctttccctttgtagtaatgtatgagttctgccgaaactcagacttgagcatgagaaaacaaaaaatggaggtgatgtgatacagtcattaagaatgtggccccatgtcatgctaatgcagattctgctaaagctaattttatcattttggggcccaaaatttattcaagtgaaatctggcctgtctttattaagaatatataaaattactcatgaaattatttgatttttgaaactccactgttaatcacatacattgaaaggtgctgaggtgacagagtggtgagaagatcacaattgactgatgatacaaacctaaaaaatcagtttgaaaaaaaggctattctgtacttacaaggtatagtacttacaagtgctatcaagaataccaaataggaagaatgcagtaccttctctaaagaagcttccaacataaaaataatataaagcagcatatgacagaagatgtgagggagaaggaagttgagttaactcagttgagcactttgcagcttgtcaagtattcattcactcaatatttcttagccttaactgcaaagtaggtattattactgctattacataaatgaagttactgaggatcaaagaagttaattaagttgcctaaggcaacagttcaaaatagtgctttcagcgttccagaaaagaggatactcattaaggagaaaatactttcagaaatggttaagacttggacatggttaaatgggttgaagaagaacatgtttgacagatatcctctctcaagcagaaacaagacaactgaactatgaaacatagctagagaatagtgagtattcaatagagggtattgattctactagattgtaacaagtagtaatgatagattggtagatttgtaacaagtagtaatgatagattggtagatttgatcagattagccactttgagtaaaaaatgaggggatccatttatccatcaggatgaagtgatttgaatcattttttaaaaaatatctacattgcaatgcaaaatataggaagccattcatatcacacctgtaattttgaaacaaagactatcatttacaagtcgtggagattggcagattgttaaaactatctgaagtggtattttcacttgtcaaaggggaataacaatagtatcttcttaaagttatttagaggattgaatacaataatatgaatattctatatgtaaatatcttagtaagtacctaaaacatagccaatacttaaaaagtagtagacattactcagtaatgataataattattatcagtaagagaaaaaaaccacaaaaggatggtggaaagaaatgaagtcagggagaatacagggtattgaaattgtcaagatgaacaaaaataaaacatctaaaatatgagaagagaaagggtcggaatatcaacaaattactcttagcaagcaacacgttgtgaaaatatttttcaaaaattttatttaagcctagattaatcatccttgcatgctcaatgtctataatctcatatatcctgcattctagctaaaaaagcaattatgccttagttctaccatagctcccttgaaatgaacttagtggttatagggcctacttttacacattgatgctgataccacctgcctccagcattttcagcatctgtcaacacgtctccaacattcagggctgtaccttaaatggtagcctatgccccatttcttcttaaggaacagagaagagcctgcacacttcagcttcccattggatatgaacaccttcctgtctagttagaaataatcaaaagataagttacatgaaggacttatttctttactattcacaaaacacaaatctattaacaatgtattgtagcagcatgacacactaaaatagatatactctaattctggccatacgtaaaccacttttttttgtcatccaacagctcgaatgagtgataaattatgtcaacttattctttagcgtattgagaaaaattatacatttaaaggatctgtttcagttacactgacatcaagactgcctaaaacaaattgtatcttagaaagtgtgatatgtattttacaaccagaaagctgctctgcaatgggctcagaatatttccatggggccaagtactctggcatgcagacccacaaatgagtaagagcaaaattctcctgtcttgggccatggcagttccagggagacacagctgtggagcatacctgttcatattccacactgtctctaacctctcatgaagatacataagagaaacaaaaaattacccgccagaatgtcagcctcatctataaactgggtgctgaagagaattactctgtctgatttcccctctttcaggagattccatattcggtgccttgaaagaggatccaatccagcagtcggttcatccaatagcaaaacctggacaggaggaaagtcctaaagtaattccaccctttcggataagatccttttaaaaagcactgtacttttaaaagtatttgggagaaacttgttagtacttaatatttcatcctaaaagttctcttacatttatcatttgaaaattgtttgacctaataaaataattttatagtcttcaatctgatttcaccagtaatttttgtttgacttacttgaggatctcctaaaatggcaatcccaaaagttagtttcctattttgtccaccacttaagttttgagcaaggatgtcttgaatattttccatttctaattcctgtacaactcgttgtacctaatcaaataaagaatatttagtccaaaacccagaaagtttattttaaaaacactatcatttttctgttctttacaaagggcctttttgcctgaaatttagatgaggaattatgtataacttagcacaatattttctagataaaccgtctcttttttatggctatgtgacatctaatatgctcacatacctctttctccacttcatgtggcaaaatcccttttattttagcaaacagcctgaggttttctttcacagtgagaaatccaaattgcacattggattgtggacaaaatccagtgaacttgctgatattttctatatcagccattcttgaaagtgtgtgattatagacagtgactgaacctgaaagcagaaggcagagagtgaccatcaggaaaatgtgtcatgcttcattgaagatcttttaaaatggaaaacactgtatgtcaattattagattcatttcaacattgtttacttgtaaggaatatgcaatgaactgattaaaaatgtaatgttcacaataacatctgatctagctggaatgctacttagtaacttaataaccataaaactatttatgacatatttaaaacacgaacaacatttttctaaataggtataatacaattcaataaaagaataagaaaaacttctaaaatttttctcttatataatgagtaatgaaactattgaagttaattaataaaaccaattacataatttttttttggagatggagtctcactctgtcgccaggctggagtgctgtggcacgatctaggctcactgcaacctccgcctcccaggttcaagtgattctcctgcctcagtctcctgagtggctgggcctacaggcacctgccaccatgcctggctaatttttatatttttagtagagacggggtttcaccatgttggccaggatggtctccatctcttgacctcatgatccacctgcctcggcttcccaaagtgctgggattacaggtgtgagccaccgtgcccagccccagttaaataattaaatgcatattaatgtgtttgtccaggtacttgtccttggataactgtcttcttacctgatgttggaactgacaacccactaagtatgtttaacagggtagtttttccagctccactgtgaccaaggagggcagtgatctggccttcatatatgtcaaacaccacacctggcatgattttaaaaaaaattacactcagagcctacatattaactttacagtctctgaaactgttgtaattttttgcagcatgaatagattgagctagcaatattcaaaataaaattcatcttaaaattctttcttttaaaactgtatttcaacattttgtagtgatagtattgtcaatatgttattatgcaattaatttttttgataaaagcagttttgtcaataaatagaggctaacaataatacaattttagagctggagaataagatgagctgaaacaaagaatttcataatactatcatatatctttcaaacccacacgatttttaatgatacattttaatgatacttttaaaaattgttttatgggttttttttttacattgaaggaaacataatgtgttcaaataaaggagagacatatctggaatatctgtgcttaatccctaccaagaaattacaacagtaaggcagccactaaatcaagcagccccattaaataaaatattattttattacctttcaaagcttctactctctcacacttccctgcatattcttttttaagatttttgattctgaaaaaaagagggaaatgttttcagagaattgtaaaaatgtgcagaggattgataagtcaagtctttgaggcttaatcaaagcctcaaagaaaatctgggattcttttcttgtaaagcctcaaagaaaatctggggattattttctttcacacaggcactggcagaagcacccagggcaactaattagaagcagaatccctgatctttccaaaatgaacaggctaaaatatggagggcacagcttagcacacggaaatatattgttagaagaattgtggcaaatgactggatatgaggaaagctgaagataaaatcagtggtgaggagatactatggtggaaaaaagaagagaaaaaacacaccataatagaaacagtagggctttggaatctaatcattaaatgattcacaactggtgaagtcccagttgtgctacacaccagctctgttacaaatgctgtgtactcaagactcattgagttcagttattcagcagtgatatggggatgacattaattatcacacagagttggaatgtagagtaaataagataatatacgcagaacacaaaatacttggaacctagtaaacttccaaagaagatgagagaggaggaaaaagaccaggaaaatgatttaaaacaaagaaagattcttaaaagagggcaaagaaaaatattttatcaggaaaaataactaatgggtactagacttaatacctaggtgataaaataatctgtagaacaaacccccatgacacaactttacctatgtaatgaacctccacatgtacccctgaacttaaaatagaagttaaaaagaagaaaaaagattttaagtgagttcaaggactacttactataagccagatccaaagcattttgtctacatttttacttacattatcacaacaaaccagcaggtaggttgtattcgcctgcttgggctgctataacaaaataccatagactaggtggcttaaagaacagacatttatttcttatagttctgaaggatgggaattccaagatcaaggtgtcaatagatttggcttctgatgagggctctcttcctggcttgcaaagagctgccttcttgctgtgtcatcacatggcagagagagggaaaaagtgcaagctctcttgtgcctcttcttataaatacactagttccagcaggaaggccccaccctcatgatctcatctaaccctaattacttcctaagactttatcttcaaataccatcattttaagggttagggtttcaacatataaattttgaggggatataattcaatttatcgaagaggtacaatccagttaaatacagaagtaactgaagagactgggcattcagatgcaatgactttcaagttgagcacgtatggattcaaatactgtttctctttttaaacttcgtagccttgggcaagttggtttttcctagtctctttttccctatcttttctttttaaaacaataataggtatcagcttgctttattccttcatttcatctaagcaatagaaatgataaattttttccatatgttttgatagcatttaactttcatgtttagattgtagattattagattagaatctatactgtggttggtataataataccttttaattgacatttcacttttctgccttctatactgagaggtgattatgagtccagctggcttcacctctgggatagaatggtgcagtcttcagaactctgtgcactggtctgttgggtgccgcaccagccacagtaatgacgcaggactggcagtcttgagtagccatgccacagataaaatctcctacactttcctaacagtcagctatgtgagaccctgcttccaatctccacccgttgctagggataatttttctagaccataagactagtcttattacccacaatttgcaaatcttcaataccctcctccttgcccaatggataaattaaaaccccttatttcatcattcaaggcttcctatgatctctctgataggacctaattctgttataggcactggaaagaacataaaacttagagttccagcttagaaagatgtcatgattcttgaaaagattgctatgtttacatgctcataaggaatgagcaaatgctgctctttgttgtatgttcatattggacctatgttcagagactgtatcataaatgtcctgagttaaaatattactgaaagagatatatcagaaaggtattactgaggagtgagatgaatacaacattgaatgatgaacaaaatttgagcaaagatctggggtattagagatttctagctgtttggaaatcaaagcaaccagaattgaataaagcatgtccatcatctaagagggaagataggcatgaaactaacagtcctgacttctgatgtttccttcccatctctctggagtgtcctcttcccatgcctgcatcgcttgcctctttctcctcatctaattataagccaggaagggaagatgagagggacaaattgaattaataaaaaagggggttgagaataatagcaagggagacgatggcagtgtttgtcacaaagagaacaactcaggggagaaaaacacaaagaggagaaataagaaagataatgtggaaaatggaaattcaaaaattatttacttgtggacggttgttactataccatgaaatattagtaaatgtaagtgctgagaatgtgagaaaatagagtgctatgaaggatgagtatagcctttgatgagtgcagcaggctggctgtaggtgggtacagagggcacagaaggcgatctttgctcctagtgtgtcacctgacagatccccagtctctgcctgttctccattggtgcctccaagtaatttattggttacctgatggcttctttcccacagaattctggagacactggttcaaaacagtcattaggtgtaggatcagaatctgtttcattctcaaggaccacatgattagcccttccgtgttgaaaccaaaaacaggatttcaggaaaaacaagggagaacatcgatgtccatattcagctatgtgagcaggaggcaattgaatactgggtcagtcatcgcttcaaggattccatcagcatatcagtgcagcccctttgacattaaacctgaacccacattatcatattaaggtctgtattaattactgttttaatgtgcttttgacacacacagaacagtgaggagaaaataacagagatggctaatatgacgtttttaacatgagaagcatgtagcattgttaactaactaaaaagctcctcaaaatgcagagagatgtctcaggaggaatttaaatctaattaagaacaattttctatctagctgtacttatgtgtcctttttattttttattttttaagatggagtctcactctgtcacccaggctgcagtccagtagcatgatcccggctcactacaacctctgcttcccgggttcaagcaattctcctgcttgtgatttcctccatttggattagataaggtcaatacaccaagaataatagtaaatgtcataacactaatgatacattccaaaatttcttacttgggaagttttaaaataatcagcgagtcattattctgtatcagtactcccagaaacgtgatgaataaactattcagaaggtctcttccttcccttcatttcccaatttccctttctgcctcttccttagcacttacctagtatatacgaggaattgacagacagaccccagagatgcacagatgaagattttgtttctctataggaaagattgtacataagggcggcatggtagctcatgcctgtaattccagcagtttgggaggccaaaggggcagatcacctgaggtcaggagttcaagacagcctggtcaacatggtgaaacctcgtctccactgaaaacacaaaaattagccaggcatggtggggcatgtctgtagtcccagctactcagcaggctgaggcacgagaatcacttgaacccgggaggcagaggttgcagtgagcagagatcgcgccactgcactccagcatgggtgacagagcgagacttctcaaaaaaaaaaaaaaaaaaaggaaagaaagaaaggaaagattgtacatcgactatgcaattataatatttttactaataacccactattgtatatcaagtgagttaaatgggaaagcacttagagatttctaagatcaagtatcaagcaccagcattcttcatctagttctgacataaacactaatagtatcatcatccataatctctcacaagtgtctctttttaaaaagaaacactctggagtgttatagcagagccaagtcttagaaagtgattctataaacaaactatagaatatcattaggcttgttgtagaaattttgaaaaactgcttgctaatttttatttagtacattgtagagttgttttaaagacatgcaattattgaaattgtgttaaattacagccatgttagtacttaccgggcaaaattttgtcaaaatataatgtcaataccaaatacagaagggtgtcaaaaaccaacatgaaaagagtagctattatgaggtatggattttgtgaagaatccaagtgggcattagaattcacatcatagtccaaatgtataagctgaaaaagaaagatacagtgaattttaaaagaattaatatggcattaagaattattattgttttatttctgctacaactgggtttgcaaagataaataagatataatcttgtctctacagagctctgtctactattatagaagacaattttaatagcaatgaagtgatgtcaatttgggaaatgaatggaagttagtactagtactgagtactaagaaacccacaggcagccccaggtacattttctaggaggaagtacaaactcaagaaaggtgatatttgagctggacctaatatagtttacaaaactctgtatgtcagtacaagaagtgtttttaaattttttgtttatttgtttgttttttgagacagggtctcactctgttacccaggctggagtacagtggtgctatttcaactcacagcaggctcagcctcctggacctaggtgattctcccacatcagcctccagagtagctaggactacagatgcactccaccatgactggctaatttttttttatttgtggagatggggtttcaccatgttgcccagggtggtcttgaacttctgccacaggagatccacccatcttagcctcccaaagtgctatgatttacaggtgtgagtcacagcatcagtctttaaaaattctttttgatggctgcacattttccattgtatggatggactgtaatttatttaaccagtaatctaccaatggacatttacgttgttttcaatcttattacagactgtgctgcaataggacttttttgggcttagaatgagaaaaaaggagggcattctcaacaaggaagtccatttcagagtgaaaacatgaaacagtaaaatacttcagtagttgggcagaagacagaagaataatgtcttaactggactgcggtaggatacaatgagtttatatctagcagaacctttcatttagcatattatagttatgatatcataactaaaattaacttttctgagacaaggttcagtttcatgtagaaatgagcaattaaaaaataaagatatatttattccaaattcctggtttttaaatgcttgtgataacattaagggtcatgtttcctgagcactgaatgagacaaatgttctctgggacaaccaattagaagtagaagctgaaacatctcaataataagggtatgatcctatatttagtgacttatggggaaactaattacactgagagagaaaaattaaagtcactcctgtctcatacatgtttatttttacaaaagttatagaatggaatgcttagagcatgttgtgtgaattattaagagggaatctgtgtagaacggtttgtaaaaagtgaaagtgttaccttaactcttacctgggccatcccaacagtgaaggcaaaggggctaagaagacacaaagtccattccaaaaatgcaggaagacgtgtatacaatgctgggaatcccaggatcccccaaaagacaataaggagaaacacaaccaagcccgtaaggaaaggtttctttatcaacacactcatcaggaaagctaaagttatctgagaaaagagaaagacttcagctggtatataattctgtgagaacagtagcacaaaaaaggaattttatattataaaagtatattttatatttttccacccctagacactgtttcatgcaaatactacaaagagaacaaaagaggtgagaccagaattagtgataaattattggcagtagagagagagaaagagaataaaagacttagatgaaattaaccaactcaccaaagacaggccatagaggagaaagagggtgaagaccatcacaaaaccagtcaggacgacaatttgtgcagattttacaataagagccattaaagtggccatgataaggatgaagccagcatacatcaaaccccaggaaagcctagcagagaaacaaagccgtcagttagaatgttgttacttcatcacttccttgattcatttattcagcaaatgatttgtgaagctcaccatttatcaagggtaaaggaaaagaaaatgcaatagctaacttatctcctaccctcaggatcacataatataaaagaaggtaggcaataaacaagtagagaggaaaattgataactaaattgcaaaataagtaaagctggatgatacaatggatgtcactgggagaggtttccagagagagcttttctgggaagacatctatgctgatttctcagctctggacaagtttttcagtaaggttattgtataaataatatggacaaaaaagtagataatggagcagggttcagcaaactttttttctaaatagccacattgtgaatattttcagctttgcaggctgtacagtttctgttgccattgtagcacaaacacagtcataaacaatatgttagtgatgtgtggctgtgtttcaataaaatgtatttatggacaacaaaatttgaatttcatatacattttcacatgccacaaaatattattgttcattgaatttttttcccaagcatttataaatgtaaaagacatctagccaaactaagcttcataagtgaaggagaaataaaattctttacagacaagcaaatgctgagggattttgtcaccaccaggcctgcctttcaagagctcctaaaggaagcactaaatgtagaaagaaaaaaccaatagcagctactgcaaaaacaagccaaaatataaagaccaacgacactatgaagaaattgcatcaactaatgtgcaaaataaccagccagcatcatgatgacaggatcaaattcacacataacaatattaaccttaaatgtaaatgggctaaatgccccaattaaaagacacagatgccagtatccaatttgccgaattggataaagagtcaagacccatttgtgtgccgtattcaagagacccatctcaggtgcaaagacacacataggctcaaaataaaggaatgaaggaatatttaccaagtaaatggaaagcaaaaaaaaaaaaaaaaaaaaaaaaaaagcagaggttgcaatcctagtctctgataaaacagactttaaaccaacaaagattaaaaaaagacaaagaaggccattacataatggtaaagggatcaatgcaacaagaagagataagtatcctaaatatataggcacccaatacaggagcacccagattcataaagcaagttcttagagacctacaaagacacttagactctgacacaataataatgggagactttaacaccccactgtcaatattagacagatcaatgtgacagaaacttaacaaggatatttaggacttgaacttagctatggaccaagcagacctaatagacatctacagaactctccacccaaaatcaacagaatatactttcttctcagcaccacatagcacttattctaaaatcgactacataatcggaagtaaaacactcctcagaaaatgcaaaagaacggaaatcataacaaacagtttctcagaccacagtgcaatcaaataagaactcaggattaagaaattcactcaaaactgcacaactacatggaaactgaatgacctgctcctgaatgactactgggtaaataacaaaattaaggcagaaataaataagttttttgaaatcaatgagaacaaagacacaacataccagaatctctgggacacagctaaagcagtgtttagaggaaaattaatagcactaaatgcccacaggagaaaacgggaaaggtctaaaattgataccctaacatcacaattaaaagaactggagaagcaagagcaaacaaattcaaaagctatcaggagacacaaaataactaagatcagagcagaactgaaggggatagagacatgaaaaaccctgcaaaaaaaatcaatgaatccaggagctgttttttttaaaagattaacaaaatagatagacttctagtcagactaataaagaagaaaagagagaagaatcaaatagatacaacaaaaaatgataaaggggatatcaccactgatcccacagaaatacaaactaccatcggagaatataataaacacctctacgcaaataaactagaaaatctagaagaaatagataaattcctggacacctacaacctcccaagactaaaccaggaagaagttgaatccctgaattgaccaataacaagttctgaattgaggccataattaatagcctaccaaccaaaaaaagctcaggaccaaacagattcacagctgaattctaccagaagtacaaaggggagctggtaccattcattctgaaactattccaaacaatagaaaaagagggactcctccctaactcattttatgaggccagcatcatcctgataccaaaacctggcagagacacaataaaaaaagaaaatttcaggccaatattcctgatgaacattgatgcaaaaatcctcaataaaatactggcaaacggaatccagcagcacatcaaaaagtttatccaccatgatcaacttggcttcatccccgggatgcaaggcaggttcaacatatgcaaatcaataaatgtaatccatcatataaacagaaccagtcacaaaaaccacatgattatctcaagagatgcagaaaatgccttcaataaagttcaacaccccttcatgctaaaaacagtcaatgaactaggtatttatgcaacatatctcaaaataataacagctatttatgacaaacccgtagccaatatcatactgaatgggcaaaagcagaaacattctctttgaaaaccagcacaagacaaggacgccctctctcaccactcctattcaacatagtattggaagttctggccagcacaatcaggcaagagaaagaaataaagggtattcaaataggaggaaaggaagtcaaattgtctctgtttgcagacaacatgattgtatatttagaaatctccatcgtctcagcccaaaaactccttaagttgataagcaacttcagcaaagtctcaggatacaaaatcaatgtgcaacaatcacaaacattcctatacaccaataatagacagactgccaaatcattagtgaactcccattcacaattgctacaaagagaataaaatacctaggaatacaacttacaagggatactaaggacctcttcaaggagaactacaaataactgctcaaggaaataaaagaggacacaaacaaatggaaaaacattccatgctcatggataggaagaatcaatattgtgaaaatggccatactgtccaaagtaatttatagattcaatgctattcccatcaagctaccgttgactttcttcatagaattagaaaaaactactttaaatttcatatggaaccaaaaaagagcccacatagccaagacaatcctaggcaaaaagaacaaagctggaggcatcacactatttgacttcaaactgtactgaaaggccacagtaactaaaacagcatggtactggtaccaaaacagatatatagacaaatggagagccctcagaaataacactgcacatctatagccatctgatctttgacaaacgtgacaataacaataaatagggaaaggattccctatttaataaatgatgttgggaaaactggctagccaaatgcagaaaacagaaactggaccccttccttacaccttatacaaaaattaactcaagatggattaaagacttgaacataagatctaaaaccttaaaaaccctagaagaaaacctaggcaataccattaagatatagccataggcaaagacttcatgactaaaacactgaaagaaatagcaacaaaagcaaaaattgacaaatgggatctaatcaaactaaagagcttctgcagatcaaaggaaactacaatcagagtgaacaggcaacctacagaatgggagaaagtttttgcagtctatccatctgacaaaggtctactatccagaatctacaaggaacttaaacaaatttacaataaaaaaactaacaacccatcaaaaagtaggcaaaggatatgaacagacacttctcaaaaagaagacacttatgcagccaacaaacatatgaaaaaaagctcatcatcactagtcattagagaaatacaaatcaaaaccacaatgagataccatctcacaccagttagaacggtgatcattaaaaagtcaggaaacaacagatgctggagaggatgtggagaaataggaatgcttttatattgttggtgggagtgtaaactaattcaaccattgtggaagacagtgtggcaattcctcaaggatctagaactagaaataccatttgacccagcaatcccattactgggtatatacgctaaggatcataaatcattctactataaagacacatgcacacgtatatttattgcagcactattcacaatggcaaagacttggaaccaacccaatgcccataaatgctagactggatttaaaaaatgtggcacatatacaccatggaatatatgcagccataaaaaagaatgagttcatgtcaattgcagagacatgcatgaagctggaaaacatcattctcagcaaactatcacaggaacagaacaccaaacaccgcatgttctcactcaaaagtgagagttgaacaatgagaacatatgggcacagggagaggaacatcacacactgggacctttcagggagtagggagcaagaggagagatagcattaggagaaatatctaatgcatgtggggcttaaaacttagatgaaaggttgatggttgcagcaaaccaccatggcacatgtatacctatgtaacaaacctgcacattctgcacatgtatcccagaacttaaagtatgataaaaaatgtaaaagaaattcctaatttgcaaattgtacaaaaacagctgatagattaccaatccccaatatagataattagatatagatacacatttatacatacccacaggacacagatagatacagacatatagacgaatatgaagatatcttttcccttactatcaatgccaaataaacaggaagaaagttctttaaaggagaaagagaaaaagctttctaatcacagatctgagttagttccagtttctcctgctacattgtaactatataatcctgagaggtagttatttaatctcttcaaacttcagttttttctggtggaaaacaggaaaattaaatgaaattatttattttatgggtttaatatggcaactggcttatagtgtgtccacaatgaacagttagtttttatttaaagtagaaaatgccatcatgttttgggatggcttatttttaagggctaattgtaataactccctttgcacagtacactttcattcatctgaaattgttcatctatattctataaactctccttagttccacttaaatgctgtacaagtaaaatgccttaggcttttcttatgagaggaaaaaaaatgccctgatttttaatcctttctcactggattattatttttaaaatcatcttggttatttttctataattctttgtatatcattttttaaaaaataggctggggtggcggctcacacctgtaatcacagcactttgggaggccgaggcaggtggatcacttgaggtcaggagttcaagaccagcctggccaacatagtgaaactctttctctactaaaagtacaaagattagccgggcatggtggcactcgcctgtagtcacaactactagggaggttgaggcagaagaatcacttgaacccgggagggggaggttgcagtgagccaagatcacgccactgcactccagcctgggtgacggagcaagactctgtctcaaaaaaataaaaaaaaagaaagaaattatctatctatctatctatctatctatctatcttgaccaaatttttttagtactgagttaactcaattttgatacagaaaaggacatcagagaaaaactttcatcataaaccaaagaagtaattcatcttctccacttctccacccggtatattgaacacttgtgtagaaaatcacataaactttatttttttctactcagtaatgtctaatattctttgaaagcctatgtagcatacgcccagaacccttatatgcattctacatatcttatttaacagggagataatatcacagtgtgtaaagggcaaattcaagattcaagccatttctttctgactccagaactcaggcttttactgcatctgtctctaatgcatcacttggctaaactcttgaaactatcttgccattaattgacaattcaacccttgtttcctaacttgcctctactgtcatctctggccataaagctccccatatctccatcaactgacacttaatattgagtgtttattcttaaccaccatgtaaaacattttagatacatttctttcttttaattctcaggaccaatgagaggtgcatattattatctacgttttacagaagagaaaactgaagtttaaagagtttaagtaattttccaagatggtagctactgaatgctgagatggagacaacccgtggcttcttgcctcccaggcttaccacagtgctctacggcctcagctaaaatatctcaatgtttaaagaacataaaaggttttctttttgctcagtgtcataaaagtgatgactcatccaacactgggtcaaaaatcaatcaccattcctaacataaggtatctgaaacatgtattttactgaatattggaaacctcacgtgtttgtgtatttgggttcacccatatatggtaactagtgaccaagtaatcatctggcgccctgagtattggcaaacatctacaggataaggctgtctttaagtcaaataaatttggaaagtttcaagtcaccaagtctgcatggtcatctgctcaactcatttataaacatactactttatgaaagtggcaacatttgtattgctttagagatctaaggcagcagtccccaacctttttggcaccagggaccagtttcatggaagacagtttttccacaaacaggagtggggagatggttttgggatgatgcatgtggattacatttattgtgcactttatttctattattattacattgtaatatataatgaaataattatacaacttaccataatgtagaatcagtaggaaccctgagcttgttttcctgcaactagatcccatctgggggtgatgggagacagtgacagatcatcaggcattggatactcataaagagcccgcaacctagatctcttgagtgacagatcatcaggcattggatactcataaggagcccgcaacctagatctctcacatacacagttcacaatagagtttgagcttctgtgatactctaataacgtggctattctgacaggaggtggagctcaggtggtaatgtgagcaatagggagtggctgtaaatatacatgaagctttgctcacttgcctgccactcacctcctgctatgtggcctggtacctaactggccatggaccagtagcagtctgtggcctggggcttggggacccctggtctaaggagtcaaccagctaagttgttctgtttgtttatgctgtataatggattggagtcatatgatttaccagaatgctgactctcggagtcccatcattgtcatcaatgacgtaatgtattgtctttcttgtgtaacattgactgatacatagtatataaatgtagaaaaagaaataatgcaaaagaaaatgaaaaaatcagttgcaactcctccttgggcaacaaaaggtaatatcttcatatgtacaccagtaactgacatcagctgttccatcactgaatgatttgttgcgatctgaagaaagatatcaatgaacaaattgttatcatcaatctaattccaaccttaggctttttctctaaattataaggaatcacgtacattctacatttatgtattttatgtttatatgcccttcatgatctggccccttgtggttcctggaacactttaggttttgtcgtgactccttagaacatcatcaacctcactggacaaaacgctactcctgttttaagactagctgaaatgtcacttcaattagcaaattttccctgatgtttcttatcagagtatatcctgcttcattgtttgcctagtacaccattttaaattccatgatagaatcaggcatggtggcatggtctgtaatcccagctacttgggaggctgaggtaggaggatcacttgagcccagaagtttgggggctgcagtgagctataatcatgtctgtgaatagccactgcattccagcctgggcaacagagtaaaactttgtctctaagaaaaacaaagttaaaaataaaaaattctatgatagaatctaaactcttattatgactatatatccatgtttctatctccccctataccagtatccctggagaaaaatgcctgtgttctacttattttctgatccccagtacttagtacaatggttttattatggaagttgttctgtatattgtgccttattaatgaagtgaataaatgatagaataggataatccattaaatcaccatccagcaaaattcaaatgcaatgtggttagattcctttaactttatactcacttctatgatagcagcattaatggcagcttgaaaagctacaaagcctttctcccagaactctgaaccttcacacttcattttttcattcactgcttgacagtgagctttagaagaagaacacatccattattacggaatgatacaatcttggctacagaaaaaaacaaaatttcaaatgtttcaaaatgcaaagtccatgataatatagtggatggtaagtcttctcagttgagagttgcagagcacacccaaacggaatatagcagaattactttacgaatatttttaagaccagttctcaatgatttttcattatattttataattctttccattggtcaagattgctttccttgagcttggatcttctgttgcttacgtcaagaaagcactaaactttaagaaaatgtttgggaatcaatgagcaagatcattttgttcaggttttttttaggagcaacttagaaataagagtaaatataatttcttaataaaacaatgtacttaagcacataagcttcatttaataaatatgaatctcctttatgttcagaaattaaagctctatgttgtggttgtatatgtttgtgtagtttcacctctgctatcaggtatgccccctttgtggctactgatacaatagcaaaaaaaatttttttcttcttcaaaagttacctgaatggtctctgtgctctttcatcatggggattctatgtccccaagaaaacttcaaatggtaggagaaggtatcagtaaagatgactctcactgcgtctattgaatagttcaaatccaattcatccatgcttttttcatcaggccaccccatgattgttcttcctgccatgtgaagaaaacaaaagaaatagttaagcaagaaaatctctacctggccatattcaattatgttgaggttattttatgttaaagctattccttcctaaaggcagtgctgggcctaaataagacatggaggggaggggggtgggaatttctgatgttctagataaaatcagaaatttatggcaaacatttgtattgcaaatataacttacccttccaaataaatcatttaaacaatgtatcattctgttcttacattgctataagaaaataccgagactgggtgatttataaagaaagaagtttaattgactcacagttccctatgactggggaagcctcaggaaacttacaatcatagcagaaggtacctctttccagggaggcaggagagagaatgagtgcaagcaggggaaatgccagatgcttataaaaccatcagatttcatgagaactcactcactttcatgagaatagcatgggagaaaccacccccataatccaatcactttccactaggtccctcccttgactcatggggattgtggggattatggggattacaattcaagataaaattttgggtggagacacagccaaaccatatcaaacaataatttaacgcacaatgaatttcaaaaaattattgctattggaaattccaacggtattggaaataatcattggtattggtactggtataaatattgatattggaaataccaatacatcaatttaaattcatatacaaacaaacctatctaaagttggaatatatgctgcaattatagtacacatcttcatttggaagtgatgtcaatgtagccaaatttccaaagacagaataaaactgttgcatttagatagtgtttccttaagagactttgtttattctaaaatatgtagtgtaaatggctgactgttactgatctaacccaggccatttaacccatataagcgcaccctcctggtgcaattcagcaagttcttttgtcctcggtatttcctacaatccagcagctagatccagaggcttaaccagactcaggtctaatccttttttgccagccgataggtgttgatgtgttgttttatgagaggcttataatttctagttgtttctctttttgagatattccagctgttgaccctcagtgcctaggtccattaattcaatgggagtttcaaaatggtgatgttttatttctatcatttctttttcatctactaatataaaacatttataaaataatattttctattatctatttggttgtgcaatagttcacgtgggatatgtgcttgtattttctctttatttgctattttccataataagaactcatcacaataggctgagtatctcttatcacacactcaagacaagaagtattttgggtttcaatttctttttggattttataatattttcatacacataataagaaatcttgaggatgcaacccaagtctaaatgtgaaattcatttatgtttcacatacactttatacacattgcctgaaggcgattttatactatatatatatatatatatatatatatatatatatataaaattttatatatatagaaaattttatatatatatatataattgttgtttgttggtttgtgtttttgagatggactttcactctgtcactgaggctggagtgcagtggcacgatctcggctcactgcaaccttcacctcctgagtgcaagtgattctcctgcctcagactcccaagtagctgagattacaggcacatgccaccacacccagctaatttttgtatttttagtagagatggggtgtcaccatgttggccaggttagaactcctgacctaagatgatccgcccacctcagcctcccaaagtgctggaattacagcacactcagcctatacaatattttaaatgattttgtgcataaaacaaagtttttactgctttttcactgtgaccgatcacatgaggtgtattggtctgtttgcacactgctataaagacatagccaagactgggtgatttataaaggaaagaggtttaattggctcacagttctgcatggctgggtgaagcaggaaatataagaaaaacaagtaaagagaaaacaagtccttccctgaccaggctgactcactccaaagtgcagctggagctatgataacattatctgcaaggccaggcaggggccccagagaaatggattccaagagcagggaggagaaaaacaagttcttatcagtctctgcctgaaattctctccccatgctatcattctttgttctgctcttataattacttttgtaactatttctgcaagtttgcaaggattttgtaagttcctgttttcccatttgtgcaggatggcaaaggtcacaagacatgcctaagttgcaaaacctgtcacagtttgattaactgcctttgttctgttctcactttccccatcctgcaaatttcacgccactggctagccaccccacttcagttgcatgaataaaagtcaagccctgtctttgttcgtggctcagcctctggatattaatctgctgggccagtggccacctaaataaaatcctcctgttccacccatatggtctttctggtctcctgattcctgcaacgtggggagacctcaggacacttacaatcatggcagatggggaagcaggcaccttcacaatgtggcaggagagacaggaagcaaaggggggaaaaccccttataaaatcattagatcttgtgagaactcactatcatgagaacagcatgggggaaattgctcccatgatccaatcacttccctccctcaaaacatggagattacaggtcccttcctccacatgtggggattacaattcaagatgagatttgggtgtggacacagagtcaaacctatcatgaggtcaggtgtggaatattccacttatgcatcatgtcaggctcaaaaggcttcagattttggagcatttctgattttgggttttagaattaggggtgctcaacctgtatcatcctctaacggtaaaacggttagttatatttttcatttaataacttgacgaaagcatggacttacgccacattggctgctgagttcttttggcataaccgatcaggtcttgatggctagtctctaagctatctggaatgacaaggttcttcaccttgtaaatgtcctgccctagaccttctcttccatagtgtgactcccaagttttaaggacacatgggtgagagaatgagactattccatacttacttatttggtctatcacactttacacatttaacagcttcaatagcattccaaaactatactagtaataaaatttctgaatatggtttcagttgcgattctcaaattggccctctctgctttctggtgggtaattatgaactcttaaagaagtttcttcaggaccatcagataccttattgtttctctttgttctcttcctacacccacaggaaaaaccacgccaatcttgtggcttttagagctttgtgtcccacccacatatatactttgtggtacaaggaaacatgtcacctcttttcattgtaaatattgcccatgggttttcaaaatgatgtatagtttctctcttaatatgtatgtatttgaaaaatcatgctgtcactacagtccaatgtttccagaatcttttcacaaacatacatttaaataaccctggactatctcattttgatatgtacaattatgaagataacccttttaatatggaatttcctaaatgggacactagtgaacaaactacaaaaaattttgagacttggaaggaatatacgttaatgttgttaataaactctagaaacttgaacattcaacataatttatgaaggaaatctcaaaatgaatttgtgccttttgcaaataaggaaattactatgaacaaccagggaacataccttttaggaatggggctgaagccactttgttcattatctcttgggtagttttggattcaggtgcaaatgcaataacataattagtatcattaaaactatctacacgtcccagatccattgaagacatttgaggagtgtcatgaacttgatgtaaattggagaaaaataggtacagaaacagtaccagaagaaatgaaaagagccattcctatatagcaataagagaaaaaggaaacaaactggtagatgttataccacagatcaatcatccacaaacagtttgaaatacttaattctgttatttggcttgcattccatttattctttctcctagtttttaaatatcctgattttctttgtccattaatctgcatatattaaaatatgcacattgtctaccaagacagaattgtaacatcaattccagttataattgagaatctaagtttaccacactctagtgcaagtgataaagcctgtattactttatgaatggcccaacagtttagtcatgttaaaattttagtgacagtgataaataaatagtaggtgatgtggaataggtaactagcttccatcaacaggagcaagatcatatcatatttttaccttctgttgctggtatgtggaagaagatagtcccaaaatgttgctcataaaaaaacaaagtttttttgaatgtggtcatcgtgaccacattcgggaattggaaatacagcacaatgcaattgaaacccagtgataagaacctagttaattatttagttatgatactacacataagtcctttttaaaagagttatatgtcatcttcatcatatgatccttttttagctatgtgtgttggtctatatctgtttctatcttaatagaaaaataaatataatgtttatataaaaaagagctaaaagtttaaaggtaaaacatctatgtagggcgggatcacaacttttacatttatataatcttttccctatgcaggaattgttgtatactttattccctgcctatccaagcattcaatacatatttgttgcatgaacacacacacacacacacgaacacacacacacacacacacacacacacacacgttcataagatcagatgttaatataagttttgaactatgagtattctatgggtgattttattatatttttctgagtttactaaattttttgcacaaagcacatctaatcattcttatgatcagaagaaaataagtactattttaatagaagtaaaagatcacaatactattttcccatttatttacatgattattatttctttcaaactgacattgtctgtgtctataatgacattgtgtagaagtgctacaatttgccttttcattgtttgttagattttggattccctgcttcttttttactttgtccctgaacttctatacaaatgcgttcatgagattcaaatgagctcagcggttaagaattgttatctctgaagtataaagatatggctttatttttcaaggagtttctgaatatgaatttttaaaaaaatgcctctagtaagacataaaacaataatacataatgtaatttgaaaaaataaattttacctgaacaaatagcaaagcccagaatttgaaaaaaaatctagcttgttaattagactacacatatgtgcaatgttaaataatgaaaataaagtgtttatgttgcctgataaaatactttttcatcctctaaatatgagaacacatagactctgaagcataccaacaaggtctgtcttttcattctccattttttgagacagttcttgcagagaagagcccatgtttgctgacccacgctcatgcgtctcttgctcattttgacctgtttcctttaaaaagacagaaaaaaaatgaagtacatgtgaaggtctaaagtagaaaacattgtgcaatcaaacataaaagaaacattgtaacagctgtttccagttgcattcctggagaagaagaaagccaaaaggctaaaataaaaacatgtgaggaaatgtttaaactcaatattgaaagaaataagaattaaaacaactatcagatattatttctccatcattggattgagaaaaatcagaagagtgaatagtgtcgatcgttgctatctcctcaactgtgggtgttgttaaattgtctaatggggagaaaggaactttccgccttgttgttgggggtacaaactaacccagtcacatgggtgattcattactaattcattactacttagcaatatcctaccatcaatcagttctgctcctggatatgcagcccatggagattctcacatggggtcatgaggggaccagtgcaaggatgttctttataatgtagattattgtggcatggtgttaataaaacaaattttgatggatacagtccaaagattactatgtaggattcaggagcactggattggcacacacccatccacatgaagacatcttaaaaatatagctccagttcaaaggaagaaagaaagaaaaagaaaagattgagcattaggtcaaaatatcattgatatcaattcacattacatgtgatacacattttccaaaaatattcaggaactaaaggatcaccatccctaatacaataaaaaggttatctttggaagtgggaaataagaatggaggttgggtgaaaagtgggaattggaaattaaagaaaataagtaaccaaaacaagataggagctttgtttgaatcaattattttgtgtgccacgaacttaagagattgattaacttttacccgggacatcatgtccagctaccaagaaaaaattacaggctgcataaggtggctcatgcctgtaatcccagcactttgggaggctgaggcaggaggattgcttgaagccaggagttagagactggcctgggcaacaaagtgagaccccatctctatttttaaaaaatcaaaaaattagctggacatggtccttgtagtcccagctaccagctacttgggaggttgaggcagaagattgcttgagcccaacaagattgaggctgcagtgaaccatcttcatgctactgtactacagcctgggtgacagagagagactctgtctcaaaaacaaatagaaaaaattataacacatactagaaggtaaaaaagaaaaaacagtataaggagagaaagtatcagaatcagactcagatgtggcagaaatgttgcaattattagactaggaatttgaaacaacaatgattaaaatactaagggcttcaatgcataaagtagacaatatgtaacgagggagaaaaaaaagtccacacctgtttctctgtataaaacacttctgataacaaatgcttgggttttccccacaaagaaattctccagttctctgtggacaccaactgggtgacctaaaattcaattcacttcaattctgacactgtctacttggagttacagcagatcccacagattaaggactcagtcccaaaagactgccccccacttcagatgccagtcagaagcctgggtcttttgtacttctgactgactggctatatattaggggttcccataacccgctccttgggtttgataatttgctagagtagctcacagaactcagaaaaacagtctaattgcaattaccagtttattacaaaggataaaactcaggaacagccaaatagaaaatatgcacatggcagagtgtgcaggacaggacactgagcttccattaactctctgggtgcaccacattcccagcaccttgagatgttcaccaaaccagaagttccccaaactccttcagttagggcttttgtggagacttctttacatgggcatgattaataaaatcattggccattggagattaactcgaactcaatctcctctcctcttcctggacatctggggatggggctgaaaccttctaatcacatgggtgattccctggcaaccagtcctatcctgaagcaatctaggggatttcagccatcagatatctcattaacacgaagatactcatttcacttcagagattcctggtcttagaagctctgtgtcaggaacagggaccaaatattataactaacgctattcccatcacccctatgactcaggaaattacaagggttttagaggttttgtgccaaaactagggggcagagacaaaatatatatttcttataatgctgcatcatgcaggaacgatgggcaaggtaagaaaggagataaaacttctaagagagaaccaaaaataaatgcctaatattaaaaaatactatcagaaatgaagaatgcctttgatctttgatgagcttattagtagactacacacagctgagaaaagaatccaaaactttttgaaaagaaaacaaaaaaagactgaagaaaaaacagagcagaatatttaagaactatgggacaattgaaaatgtgtaacatatgcctaatgggaataccaaaaagagagaaagaaaggaacagaagaaatactttaaacagtaatgactgagaatttccccagataacggctagacacccaaccttagattcaggaaggtcagagaacaccaagcagaatatttgctcaaacaactacaccaagaaatatcattttcaaactacagaaaatcaaagataaagaaaaaaatcttaaagaagccagaggaagaaaacatcttttctatagaggagcaaaaataagaattttatctaacttttcttcagaaattatggaaacaagaagagaataaagtatttaatgtgctcagagaataaacccaccaacttagcattctacccttagtagaatgtactctgtgatattaacctcaaaagatgaaagagaagtactttctcagacaaacaaaaaatgagagaatttgttgccagtagacctgccttgcaaaaatatgaaaagaagttatttcaaaagaagtaaaatgatatgtcacaaatttatatataagcctggacacagtggctcatgcctgcaattacagcactttgggaggctaaggtaggagaatggcttgagcccagaagttcaagaccagcctgggcaacatagggagaccctgtctctacaaaaacaaaattatttaaattagtgaggcatgatggcttatgcctgaggccccagctactaaggaggctgaggtagaaaggatcacttgggcctgagaggtggaggctgcagtgagctgtgatggtgaccccgcactccagcctgggcaaagagtgagaccctctctcaaaaaaaaaaaaaagaaaagaaaagaaaattcagatttacataaagaaaaagcatgagagaaagaaagaataagtgaaggtacaataaaaactttttcttatttttaactgatttgaaacataatagaaaataatagcaatgtattcaattgtgtatacttatgtttatatatgtatataatgccatatatacaatatatgtattacattcatatataatgttcctgtatgcttatctgtaagtgaaatgaatgacagtaatgatatgagggacaggagggaggaggaattggggttattttgttattataagatacgctaccaattaagtggtatagtgttattcgaaagttgacttggattaattgtaaatatatattgcaaactctaaggatttaatttgcttttcttttggaaaattcatgaaagaaagtaaaaacaaaaaacaaaaaaaatgagtctaaatgaatgataatctaagaaagaaggaaaaatgaaattatattaaatgctcaattaaaaccacaaaaggcagaaaaaatgtagaccaaaaatagaattgaagactagaacaaaggcaataaatagaaaatggtaacaaatttggtagatactaatccaatatgtcaataatcactttgatcatcaatggtctaaatgcaccaattaaaagacagagattgtcagagtagatgacaaaaaagatgtaattacatgttgtctacatgaaaccagctttaaatataaagacacatatagattaaaagtagagggataaatatagatggaccatgctaacaataatcagaagaaagctggaataactatattaatttcagatggagtagaattctaaaacagaacagacttttcattccaaagaaggaaaattatcagggataaagtgagaagttacataaagttaaaggggtcaattttccaagaagtcatagcaatctttaacatgtgtgtgctaacaacagtgtcaaaatactgagagaactgcaaagagaaacagatgaatccactcttatagttggagacttcatcacctctcttggcagaaatggacagatccagcaggcagaaaataaataaaatcagagttgaactcaacaatataatcaaccgattgggtaaaatgaacatttctacacacgatttcactcaataacagcaggaaattcatccttctcatgctcacatggaacgctcaccaagatagaccaattttgagccataaaacacaccttagaaaatttaaaggaatagaaatcatacaatgcatgctcttgggcaatggtagaattacactagaaatcagtaatagaaagataactggaaaatctcccaaatacatggaggttaaacacacttctaaataacataaaagtcaaagaaaaaaatctaatgacaaattaaaacttattttgaactaaataaaaatgaaaacacagcttatcaaaatttgtggcatacagtgaaagctttgcttagagagaaatttacagcatccaatgcatacattagtaaagaagaaagatctaaagcaaacaatctaagcttacaccttaggaaattagaaaaagaaaagcaaattaaatccaaagaaagcaaaataaaagaaatagtaaaaattatgatagaaatcaatgaaacggaaaacaggaaatcaatagataaaaatcagtaaaaccaaaagctggttctctgagatcaataaaatcaataggcctctaccaagactaactaagaaaaaagagggagagaacacaagttgctaatattagaaatgaaagagggggcatcactacagatctcatagacattaagaggacaatcaaagaatattatgaacaaccctaggcttacaaatttgatagcctagatgaaacgaatcagttccttcaaagagacaatctgtcaaaactcacacaagaataaacaatctgaattaacctttatctgtcaaagaaactgatttaataatcaataatcttcaaaacagaaagcatcactggtggttccccagtgaatgggttcactgggaaattctatcagactgttaaggaagaaattatttcaacactctacaatctcttctagatgctagaagcagaaaatgaaatacaattctgaatctttgttctgtatctttcaactcctcgtccttcatcccctgggatatttacaaaagcctacttcataaggtgaagcctaattagataggatatactgtgtaagagataatgagcagaaggaactagagtagagtgatggtggtaataactattttggaatagttaaatatgtggtgatgaagaggcacagaaataaaagccagatctatgtcacttggtcaatagagattttcctatgaaacatcccaagaggtaggaagacttggaactcatagttttaactagtgttcaatggtgtgaaaatgcattttggggagacggtatgggcataaaaatgtaattattgtggaatggactgttgagtcaaggaataggtttggtgtattatagacaaactttattcttgcaaagtagatggcccgcttttactgttgatagaaaagagcacccaaactaatcttcacatctatgatggctataaccttcctatacatatgtggataggtgggaggtggagttagggagaatgaatcagccaaatagagataaacaaatcacataaaattgtccttgaaggtacttaaacagatacctcattctaccattgtattattgaaatcaatatagggataatcatttgtaggcaccaatgttgctctgctattttcaatgagagacaatcacccatgcctgcctgcttatgggctcagccttggccttgagggtaacccacataagggcctaggcttacaagagtgaaagagagagagagagagtggcctttaggcttgcacacagatccaccagtcagccagactttcactttctaaaacatgggcctaggctttaggaagtctttataggctttaggaagtctttatagaattgtttgcagagaacaaacaaagaattcaggatatgtctgtccaaaagccattaactgacctactacaacataatgaaggtaacttacttcagatatgacagtttcagtttggtagtgcgggtacaatgtaattatttatactctttcatgttaacacagctcaaaaactatagtcacccatttgtatttgtgggttctgcacttgtggattcgaccaactggcggtagataatgctcagaaaaaaaggatggctaggtttgtactgaacatgtagaagctttttttttcttgtcattattcctgaaacaataaagtataacaattatttacatagaatttacattgcattaggtattgtaagtaagctagagatgatttaaagtacgcaggagaatatacataggttaaatgcaaatatgacaccattttacataatggtgtcgtatataagggagaataacaacgatggtctgaaagttgtagagctttagtgaacatgaactattttaactgataaagaaaacgtaagacctaatcttagctaacaaacccaacattctaggatgggaaactcacccaggaaatgattcaaaggtagtagttcaagtcttggtatagtggagcacaaggccagttgactaataaggcctgtgttttcacatcaatggtatcctcttttggtgccatgttgaacaggagtggcaatcataaggttgctattgccccttcaatggttttattaatgagggtgctcctggatcctaggttcatggttcatcctgccatattcatggcaggagcaaagccatgaatatgctgaccccttctggtattcaagagacagctcaagtgggaagacgatttattcaagtcagcctcaagggggtagtaccagagatggagcctatccatggtctattgcagggaatactgtgctgctactgaagtctgaagggcaaggtgtattagtctgttctcacactgctaataaagacttacctgaggccaggtaccgtggctcatgcctgtaatcccagcactttgggaggctgaggcaggtgaatcacaaggtcaggagttcgagaccagcctggccaacgtggtgaaaccccatctccactaaaaatacaaaaaattagctgggtgtggtggcgagtgcccgtaatcccagctccttgggaggctgaggcaggagaaccgcttgaacctgggaggcagaggttgcagtgagccgagattccgccactgcactccagcctaggtgacagtgtgagactgtctcaaaaaaaaaaaaaagacatacctgagactgagtaattcataaaggaaagaggtttaactgactcacagttctacatgactggggaggccacacaatcatggctgaaggcaaataaggagcaaagtcacgtcttatatggtgccaggcaagagagcttgggtaggggaattcccctttataaaaccatcagatctcgtgagacttgaatactatcatgagaacagcccaggaaagacctgccccaataattccattacctcctcctgcgtccctcccatgacagatagggattatggggactataattcaagatgagattggagtggggacagagccaaactatatcacaaggcatagttgaagagaaatgtgattggcagaataatggtcccgttctaatcctggaatttgtgaatatgttacagtacatgacaaaggggaattaaggcagtagatggaattaaggttgctaatcagctgactttgaaatagggagatcatcctggattatctgggtagacccagtgtaatcacaagggtgctaaaaagtaaaacagggaggcagacaagatcagagtgaggcagtagaagaagggttcattctgctgctacggctttgaagatggaggaggaagaccatgaaccaaagaatgcaagaaacctctagaagctacacagggtaagaaaacagattctcccctacagcccccagaaagagacacagcctagccaaccccttgatgttagccgagtgagaaccacatcacacttctaacccccagagctgtaagatgataactctgttttgttctaaaccattaagtttgtggtcattttttttttttttacagcagcaatagaaagttaacatgggggcagggttgggggaaggagtccgagagcctgaggcctgagaacaagacaggaagacattgctggacatttattttatgacgtgcctcatcagcagaacaaagaagggcatggacttatgtttaaaaactgtccagaagtgaccaaagaaattcaccagtgatgcagatgagctcctaataatcatgccatcggagcaggctgtgatagcctggaaatcctgcctgaaaccaaactgcaacatttccaactaagaaatcaagcggtgataaacctcagtatctgaaagggttaaatattgtgcccacgtgactactgttctttctttctgtgaattaatgtgtgtgccagaaaatatttgtgaataaaaaacaattacataatctcattgtcatgaatgtggttatttatctctgagcgttaagactgatttttccccccactgaacatcttagtgtaaatatcagagaaaaaatatactacccaccgtaataatataaaacatctaattagcttaaattgttctgaataggaaattgtataatttagaaataataaattggttataaaaagccaatcatttcccagtcagataaaattcctgttattcacagaacaaatttttctaatttgttgcactgggcaacaaattagatcaaaattttaaaatagttactataataaacaagatcaataaaaatctttccttaagttttcttgatgaaaatattctcaagccatttaaaaacaattcaaaactcagaaaattatgcatcctgcaatgcttacaattcctctggcagtaaaattaaaaacaaacaaagaagagtaagtaattcaaataaatttggaaatagttcatacttgtaaagaagcaacataacgtgacatttcttttgatttattcaatagcctattagataatgtatgctatttgtccaaaaatgttttagttacggggtaaaaatttaaattcttagttcttcatttggttatttagacatacaaaataaaatagatgatttaaaaagtcaaaatgactcgttaataacttactgcttttaatggtttctacctaaacgtctggcatgcctatttatagtcttatgttatatttctatatgcaaaataaccacaattttagaggttaacttactctcaggaaagctggaggaaaaatctagaaacacagttcatccatgggtctctgcatgttctggaggagaattcacattccttttgggtcactactacatcatgcttttaatttcacattcattgtgaatagttctgttttatacaaatttcccaggagaatctggtctcagttcagctagcctgccaaaatatcttctgctcacgtggtgatttctttgctgttttccatttctttgtttcctgctagttactcagcagggagtttgtagttgcagatggttggctggacatatcaaaacattaggaactatcaaaccaaggagaatctagcctttctcaatcggtcttttcatacaaggccctaatgggagagttgaccccaacacaatgatttaaacaaagataagtaagaagccaatccagagaagagtagagcagaacaaagtgaaaaatacataaatatatatgttatatatatatatattttaagtgacaagtaaatacatacaaattgggttagaaactatttaaaaccttcaacagattcttaaaacttgaatccagaaatacggcaataaagcaatgtaattttcttcagggtaacaaaagaaactctgagtttccatctgcatctcagtttcattgtgtgcatactaattgtagcatctttcatctttcatggtactgaagcgagcagaatctttagagaaatctcacataacaattacctgtgctctcaaagcctccaggcttgtcatctctgcaacggttcccatgaaacaaactactttctccaccagtaactactgaattttagtatgtcctgctttccagtattgttagagaaacatttttaactggtaatagatgccattctgtctatttttgagcatcttatgtaagtagaagaaaagactgttccaaaattcttataattcatggagttcatctttggctgaagaagaggggggaaaggaccactatcattctgcttacagccagtaagtctgttaaattcttcagtactgtaatttcttcctgaacatacagctgaaagggaaacaataaatgcatgcaattcttaaatcagcctcttatctgtgtctcatggaccatgataaccaaatgaaatcttccttacccatttcccattctctcaatattgattcaattatatttatcctttttctaattatatgcgatccagaagttgctcagcaagcagtctgtggaagtaggctgaactcctgaatccatgagactgtcaaacttaaaaaaaaaaaaaaagacttctgattgtttccatatgtctacagaaaaggttataggttggttgattttctgcagaaaatacaaaattatcacattcaatacatttaataacatcgccaacattttgtgcacagagaatataatttaggaaattttttttcagtaacttgtttcctagaagaactttgtacctaggttagagcttatgagttctggacctagttgattttgactttcggttctaaattctgttttcaatgtttccttcagtgtaccacactgtaatctctgtggcactataacagagcaagctccctctcattgatcttctttttaatattttctagattaaacaatatttaatatttatttatttatttatttattttgagacggagtttccctctgtcacccaggctggagtgcagtggcacaatctcggctcaatggaacctctgcctcccaggttcaagcgattctcctgcctcagcctccacagtagctgggactacaggcacctgccaccacggccagctaatttttgtgtgtttttagtagagaaggggtttcaccattttggtcaagctggtctggaactcctgacctcaaatgatgcacccaccttggccccacaaagtgctgggattacaggcagaagccactgcgcccgacgtatttactcttataaagaagtttttgaatcagtttaccaattcaaaaacaatcccatgggagttcaaaaatgaaatgacactgattttataccataatgtacactttttttggcaactacatatagcatttattgtgtctaagacatacttaaatattaaaacatttaatccacagaataatcccatgaggtaggcattattctaatcaacccattttacggaccagaaaggtgaggcccagggagttacataacttgcccaaattcacacagatggtgagtagcggaaactgagttaaaactcagacaatctgtagagtctatgagctcaaattacaaatgctatgctgtctcatttgcatatatctctgtttattccattattcttactttatgtgcacatattttacaattttccttgccttttgcttcatttattttgcggcagtattctccagtgccagaaaccttataaatttcatgtgatgtgttttgcaccagactacaacattcttcttggaatctttgctggctatttgtaaggaggacttgtcaccccaagacctgtgtgcagcccttctcaacactgtgcaaaaacagaaaaacctgatctgtaaagagagaaggatgaagcggtccagctgcctgataaagactgagaatgtctgcttgttttccaggggcttttatcttcttgcttttcattctttctcagatctggctgcactgcctgcatgtgagttttgtcagatatcctccaaacatttctctttgttttttgttttgttttgtgtttgtttttttttgtgtgtgtgtgtgacgtgatctctgctcactgcaagctccgcctcccgggttcatgccattctcgtgcctcagcctcccaagtagctggaactacaggcgcccgccacgatgcccggctaattttttgtatttttagtagagacagggtttcaccatgttagccaggatggtctcgatctcctgaccgcgtgatccgcccgcctcggcctcccaaagtgttgggattacaggcgtgagccaccgcgcctggccctctttgtttcttaaaaatgtaataaattctacttggtcttgttttgtgctttttttgccttgaaatatcctttgtgtgatatattcctgccctccactttcatttgcaatttgcatttctcagatatattttgacaaacttttattacatgcctaaaggatgcctgttgaagtagtataattgcatttctctttttaccttatctgcaaatcttctactatccatgggcagggcagggaaggggatgtaagtcctttggttacccaatccttttcttccagtcatcttattttatggtctctttaaattacgctttcctgttatttcccatttatccatttctgtagtgattgtgttttctctgttccttttttcaggttccccttttcctttttccccaactatcatctataaagttctggatcagtattttgttctactagtgataaccctcaaatgttaacaaacgtatcaggatctacattactctggcaatataaaaaatcagcctatgtctctatacatctttctcccccatcttcctgctccttataggatacacccgttagcatatttgaacttaaaacattagctctacttcttactaattgcaatgcaaggcaagtaacttaccttggagccccaatgatttacccaggaagctttagttttctcatctgtgagatccagaggacacaatagtatctaacaagggtgttttagaatttataaatttaggtttggggtggaggggagatggtagagattaaaggaaataacatatgtaaagtattgagtgcagtagcttgcaatgagggatgactcaccaaatgctagagactctactctccacggctgtgtcaaaactagacattataggtgtttgtaaattttaccagtctgattaataaaaaatagtaccaccttgataacttatatttcttagtggtgtcaagcatattttaatatactttttggccatttgtaaatttttttttactataacaaatctgttcattttctctatctgtatttttgttactctgtcattccattattgttttctgtttttgtttatagctctgactgaaaatgtcttatatttctcactttaaaaatagcatgttattgctttctcatccagatatgatgataaagtgcttttggtactcgtaagtttgaggtttttttgtttttcttgtgaagacatcttagggttttctctttaaccacaagtgtagggaatttcatgacagtgtgctcaggtatagatttttgggttttgtcctacatggcactttgtgttcacttgcaatcaaagaacttgtgtctcctttttaagttctgggaaaattttaactaataccttcatcaaatattgctttccttctagtctctctattcttttctcttggaagtttattagatattgagcaatgttgtccttgtgtctatcctttgcttatctgccatcttgaaatgggaaagcaatctatttccacatcacatataaacaatctttctgacatagaatttttatgatatcattcccactactgccttgactgtgtcctgatctctttgcaaatgtacaagaattttttttttaattatctggtcctttcttctctttccactcttcccttgccttgtctccttcctccaactcaagccagatacttctacatgattttcttttttaataagtacatcatgttctcatttacctctctttgctctcctgtaactaactccggttcacaagtggacttctctggtgactacaactatctgctcagctcctacttttccttcaggtttcagctctgatctctcctcccacaaggtgccttccttgctgatacagtttggccgtgtccccccggcaaatctcgtcttaaattatagttcccataatccccatgtgtcgtgggagggaccttgtgggaggtaattgaatcatgagggcagttaccctcaggctgttcttgtgatagagagtgagttctcataagatctgatggttttataaggggcttttccccccttttgctcggcacttctctttcctgccaccctgtgaagaaggacatgtttgcctccccttctgccatgaatgtaagtttcctgaggcctccccagccaccatgaactgtgaatcaattaaacctcttttccttataaattacccagtctcaaatatgtctttactagcaacgtgagaacgaactgatacccttgccctcattgcatatgggttccatgccccttccaggtgcccccacagcacgctgtggttactgctattgtagtatgtacctcactgtcttttaggctaaatatactcatttctcccacaccatagattgtaaacaactgaagggtacaaaatcatcaccgctgtgtacctcacagagcctggaacatgaaggttgctcaatacatatgttttaagttttaaatgtataatattgaatgtgaggtaggaaaacaaaagaaaaaaagtatcttttttttttcaagaagcttagttataaaagaaaggttgtaggttgggtggtagtttaagtgagttgtttttgtcaagaaaaggttgttattttgttttttaaagacaacatttaaaaagggaaagtgaggaggagaacgctgaacacgcaggagaaacgcagtaacaggtggagtgctgcttttttggaggggctgcgtaagacggtattggatcagatgggacaggtttttttttttctctgtcacaagaaaaaaaggaagtgccagtgaaagctgagaggattaaaaaatgtgacaacacgaagtaaagatttccgtcctcagggttaagatttttctgtgaagtaggaagcaaattctaagaacaaaccaacagatgtgctgggcacttgaggatactgtgaggagtcttcaaataggtatcaaggagagtggaagattgccttagacatgtcaggaactcataagtcctgctgccttaagaaatgctccttgaaactaaaggaaaatttgtaaggtttatctctgaactgatggctcaaaacaacatatttttagaagttatttatcattaattaaaatcattgatggatcaggaaaggcatcgatagctattgaaactgataaatagtgagtgacttaaagacttgacagaaaaatgctttaaatgtacaagagaaaagccgtacttatggaataaactgagttactcatacctaagacactagcaccaatacaaaaatagcaataaaaaaagaattgacatatttaatgctaaattttgtaatatttttgctatttttgtatgaatggaaattttcttaatatataattaaatatgatttaatattttttaaatttatattcttcaactttgaatttataaaagaaagtcattgtgccctgtaatcccagtactttgcgaggccaaggtgggaggatctctcgagtccagaagttcagaccagcctgggcaacatggtgaaaccctgtctctacaaaaaataccaaaaaatcagccaggtgtggtagtacatgcctgcagttccagctactctggaggctgaggtgggaacatcacttgagcccttgagcctgggaggtggacgttgcagtgagctgagatggcgccacagccttccagcctgggcaacagagtaagcagagtgagaccttggaaaaaaaaaaaaaagaaagagagagagacagagaaagaaaaaagaaagaaagaaagaaagaagaaagaaagaaacaaagagaaagaaaagaaagagaaagaaagaaggaaagaaggaaagaaattgggttatacaggtttcttttttattcttaccctatataagactaactagtaagcctgggctcctcaaacatcaccaacaattacaattacattacaagttatagtcagagttcagaagcctcacagagctcactgggtttgaaagaactaaacattgctgccattgcatttcttgtcagcttctgttgggggcagtacataaaaacaaagagtttattttgttatagtagatgctcatctctgtgcaggaaacctaaacagaaacactgggaaatcttggctccttatcttataggccaggaaatctaggccccactccacaatatctggggggcactaattctttctgtatttgttttaagatgtttgattaaattaatatatgttagattttgcctaggtcttttttctccagagaaattatttactgttacataggaatctcaggtgttcagcctttttataaacattcaacggaaacttcaaacaaaaatgtatttggtcatctaaaattattgtttccaatatacaatcattattcctctgagcccatcctgggagtattttatgcaagttttctagtgtatttagcatacaacttaaaaaaccttaagaagatatcaagccagttacttttcaatttatttgtaccaaaataccacacagtgggattttgtaagataatagcaaaatctttattgctatttctatttctattgttgaactatgctaatgtgaatgctccttcaacaaggaaataaataaaatggttaaataagaagtaacaaaaacagagatcacatttaaagaaaaataaatacccagatgccagaaatgaaacaggaaaacaaagctaaaaggagattgctattttaagccagtaagttttaaggtggtttggcaaaggctgattgacaaaccagctaaaatataattcatgtgtaagcataaaatagatatatctttaccccaaaaaactgagatttctattttatggacatctctgaaagaactactaataaatatcctccaagaagaagaaaaaactgaatccagaaagaagtaggtgaatgctagcaactaataaatatattagtgaactaaataaatattgattgtgcaaactaatgatgataatgactaatgtgtgcagggggcagtgttaaacacaatggacaactcaagtatcaaacagcagttatatgggaggagagagccatgatcagagctaagttccctaaaaatcttatagtttaggaagaggacaaagatatgattaactttaaaactgcattcttcagtaaggtagccactagccccatgtgagtatttaaatgtaaattttaattaattaaaaatcaataaaatttaaaattcaatttcttcacctccaacatgtaaagagcgtggaagtcattattcgctttcttgcagtaagaaaaaacctaagcaaactgaaaatcagtgatatttcttggacccatcagagattgaggtttcagggcaaactacaaccctaaaatccagagaaacaagtgaatacagagaatcacagccaagatcagcttacctggagcagaaatcactagagccagaaattggtaggacggaatgcataaatggtaattttgatgaattgctggaggttgagtgtggcctgcagccgggggagacattcctggggtcagtccccttaaggggaagaaacaggtgagtgtaactggaggagggcaaagcctgtgggcctcaaggatccattcaccactagatctggtaccaaagcaggggaggagggtctgacctccctttccttctatcctcaatctgttgctgctacttcctgttggattaatcaaacccagctggaatccaggcatcaaagaagagaattggtgatgcagtacacagtggtcagcttcttttacaaggggtgtgttagggaaatagagagtaaagcctgcactagatctctctacgacagcgttgaaatagtttagttctttttccatttttctcttgatcccttcttttgttttattctgatcttccgttttcagaatcattaatctgctcctaaatataatcttaataaaaacccattaatagcttgaaaaacaaccatattatgatatttttagcaaactatgtccattttaaaacttttaaaacctttatactatatctgatgttggttattcggtatcttgtaaacatttccataacacttaagaaaacttatagtttatcaaaaacacaagcaaagatttcattatattgttattgaaagtggttatatatattgtcatgttattcatttgagcaagacaggagaatttattgcttgggttttagaaataatttaaataaattcaactatcattgtaaaacaaatttacatttataaagcactaatggttccagaatgaacaaattataggttatttatcacaggtttggaaatgtaactcttcagatacaattatatctgtaaaatatacagataaaatatttaattacataaaatgcttatataatagataagaaaaagattaaagcataaatataaatgatcaaaaaaatacaaaaattaaaaaaataaaatgcagctcccgggcaagatggccaaaagagaacagccctggtctgcagctcctagcgagatcaacgcagaagacgggtgatttctgcatttccaactgaggtacccagttcatctcactgggactggttagacagtgggtgcagcccattgagggggagcagaagcagggtgggccgttgcctcacccgggaagaacaaggggtcaaggaactccctcccctagccaagggaagcgtgagggactgtgccttgagggatggtgcactccggcccagatactatgcatttcccatggtcttcacaacccacagaccaggagattcccttgggtgcctacaccaccagggccctgagtttcaagcacaaagctggatggccatttgggcagacaccgagctagctgcaggaatgttttttgtaccccagtggcacctggaacgccagtgagacagaaccgttcactccctggaaagggggctgaagccaggaagccaagtggtctagctcagcagatcacaccttcacagagcccagcaatgtcagatccactagactgaaattctcactgccagcacagcagtctgaagtcgacctggggtgctcgagcttggtgacgggaggggtgtctgccattactgaggcttgaataggtggttttcctctcacagtgtaaacaaagctgtcaggaagttcaaactgggtggagcacaacacagctcagcaaagccactatagccagactgcctctctagattcctcctctctgggcagggcatctctgaaagaaaggcagcagccccaatcaggggcttatagataaaactctgatctccctgggacagagcacctgggagaaggggcggctgtgggcacagcttcagcagacttaaacgttcctgcctgctggctctgaagagagcagtggatctctcagtacagtgcttgagctctgctaagggacagactgcctactcaagtgagtccctgacccctgtgccttctgacagagagacaactcccagcaggggttgacagacagctcatacagaagagcttcagctggcatctggcgggtgcccctctgggatgaagcttccagaggaaggagcaggcagcaatctttgctgttctgcagcctccgccagtgagacccaggcaaacagggtctggagtggacccccagcaaactccagtagacctgcagaagaggggcctgactgttagaagaaaaactaacaaacagaaaacaatagcatcaacatcaacaaaaaggacgaccacgcaaaaactccatccaaaggtcaccaacagcaaagaccaaaggtagataaatccacgaagatgaggaaaaaccagtgtaaaaaggctgaaaattcaaaaacccagaatgcctattctcctccaaaaaatcaaaactccttgccagcaagggaacaaaactggatagataatgagtttgatgaattgacagaagtaggcttcagaagatgggtaataacaaactcctttgagctaaaggagcatgttctaacctaatgcaaggaagctaagaactttgataaaagtttagaggaattgctaactagaataaccagtttagagaagaacataaatgacctgatgaagctgaaaaacacagcacgagaactttgtgaagcatacacaagtattaatagctgaatcgatcaaacaggagaaaggataccaaagattggagatcatcttaatgaaataaagcatgaagacaagattagagaaaaaagaatagaaaggaatgaacaaagtctccaagcaatatgggactatgtgaaaagaccaaacctacattttattggtgtacctgaaagtgacggggagaatggaaccaagttgggaaacactcttcgggatattaaccaggagaacttcaccaatctagcaagacaggccaacattcaaattcaggaaatacagagaacaccacaaagatactcttcgagaagagcaaccccaagacacataatcatcagattaaccaaggttgaaatgagggaaaaaatgttaagggcagccagagagaaaggtcggtttactcacaaagggaagcccatcagactaacagtggatctcttggcagaaaccctacaggccagaagagagtgggggacaatattcaacattcttaaagaaaagaattttcaacccagaatttcatatccagccaaaatgaatttcataagtgaaggagaaataaaatcctttacagacaagcaaatgctgagggattttgtcaccaccaggcctgccttacaagagctcctgaaggaagcactaaatatggaaaggaaaaactggtaccagccactgcaaaaaaaaaaaacaaaatgtaaagaccatcaacactatgaagaaactgcatcaactgatgggcaaaataaccagctagcatcataatgacaggatcaaattcacacataacaatattaaccttaaatgtaaacaggctaaatgcccccaattaagagacacagactggcaaattggatgaagagtaaagacttatcagtgtgctgtattcaggatgcatctcacatgcaaagacacacataggctgctcaaaatgaagggatggaggaatatttaccaagcaaatggaaagcaaataaagcaggggttgcaatcctagtctctgataaaacagactttaaaccaacaaagatcaaaagagacaaagaagggcattacataatggtaaagggatcaatgcaacaagaagagataactatcctaaatatatatgcatccaatacaggagcacccagattcataaagcaagttcttagagacctacaaagagacttagactttcacacaataatagtggcagactttaacactgcattgtcaatattagacagatcaacaagacagaaaattaacaaggatattcaggacgtgaactcagctctggaccaagcagatctaatagacatctacagaactctccaccctccatccaacagaaattacatccttctcagcaccacacagcacttactctaaaatcgaccacatagttggaagtaaaacactcctcagcaaatgcaaaagaatggaaatcataacaaacagtctctcagaagacagtgcaatcaaattagaactcaggattaagaaattcactcaaaactgcacaactacatggaaactgaacaacctgctcctgaatgactactgggtacataacaaaattaaggcagaaataaataagttctttgaaaccagtgagaacaaagaaacaacataccagaatctctgggacagctacagcagtgtttagagggaaacttatagcactaaatgcccacacaagaaagcagcaaagatctaaaattgacaccctaacattacaattaaaagaactagagaagcaagagcaaacaaattcaaaagctagcagaagacaagaaataactaagatcagagtaaaactgaaggagacagagacagccttaaactcctgggcttaaactgtcctcccacctcagcctcctgggtagcttggaccacaagcacataccacccggctaacttttacttttttttttgtagtttgtagtgatagggtcttgctatgttgcccaggatggtcttgaactcgtggtcccaagtgatcttcccacctcatcctcccaaagcattaggattacaggtatgagccatcatgcctggcctcttttcttattatgctataaccaggtattgtgatttatcacctggttttcttagctcttgtgaagacctttttgtggatagttattcaaatagatgtttttatagaaggacaatcactggtgagaactattctaccatcttgctccattctctccttgacatggtgattcttttattcaattttatttaatttctatatttttctctattatacaaattttcttcattgactataaaaatatttttatttttataatttcaacttttattttagattcaggagatacatgtgaaggtttcttacatgagtatattgcatgatgctgtgtttgggatacaaatgatctagtcacccagatagtgagtatagtaaacaatggttagtttctccttgcctccctccctcgtctgttagtcccctgggggactattgttgccatctttatgtccatgaatacttaatatttagctcccacttataagtgagaacatgtggtatttggttttgttcctgcattactacgattagaataatggcttctagctgtgtccatgttgttgcaaaggacatgattttgttcctttttatggctgggtattccttttgattccagggtatatatgtactacatttcctttatccaatccaccactgacgggcatctcggttgattccatgtctttactattgtgaatactgctgtgattaacatatgaggtcatgtttttttggaaatttatccatttcctctaggttttctagtttgtgtgcattttcctttggttatatacccaataatgggattgctgggtcaaatggtagttctattttaagttctttgagaaatctccaaactgctttccacagtggcagtgttcccttttctccacagccttgctggtatctgctgttttttaatttcttaataataacaattctgtctggtataataaggtatctcattgtggatttgatttgcatttctctgatgattagcaatgttgagcattttttcatgtttgttgactgcttgtatgtcttcctttgagaagtgtctgttcatgttttttgaccactttttaatgggattactggttttttgcttgttgaaataagttccttatagatacttgatatttgacctttgtcagatgaataggttatgaatatattctcctgttctctaggttgtctatttactctgttgatagtttcttttgccgtgcagaagttctttagtttacttaggtcccgcttgtccatttttggttttgttgcaattgcttctgaggacttagtcataaattctttcctaaggcagatgtccagaatggtgtttcctaggttttctcataggattcttacagtttgaagtcttatgtttaaatctttgattcatcttgagttaaattttgtatatggtgaaaggtgggggtccactttgattattctgcatattgctagctaactatcctaggaccatttattaaatacggagtcctttcccgattgcttattttgtctgtttgtcaaagaacagatggctattggtgtgtggctttatttctgtgttctctattctgttccattggtctatatgccttttttgtacaagtatcatgctgttttggttactgtagccttatagtatagtttgaagtcaagtaatgtgatgcctccagctttgttctttttgcttatggttgtttcggccattcaggctttttaatataaattttaaaatattttttctaattccatgaaaaatgacattaatagtttggtagaaatagtgtcaaatctgtagattgctttggggagtatggccattttaactatattatttcaatccataagcatgtcatatttttctgtgtcatctatgatttctttcagcagtgttttgtaattcttcttacagagatctttcacctccttggttagataagttagatgtattcctaggaatttattttttgtgtggccatctatttggatactttctatttccttttcttgcatcattgctctggcaagaaattcagtactatgttgaataggagtggtgaaagtgagcatccttgtcttgttgcagttttcaaggggaatggttccatcttttgcccattcagtataatgttggctatgggtttgtcattgatgtttcctattatttttaggtaagttccttcaatgcctattttgttgagggtttttatcatgaagggatgttggatttaatcataggcttttcccacatctagtgatatactcatatggttttatttttaattctctttatgtggtaaatcacatttattgatttgtgtatgttgaaccaaccttgtatcccaggagttaaggcaagttgatcatggtaaactaaattctgatgtgctgttaaattcagtttgcttacattttgctgaggatatttgtatctatattcaccagggatattgttctgtagttttctttgttgtgtctttgccaggttctggtattagggtgatgctggcttcataaaatgagttacggagtagtccctcatctgtgaatttttagaatagtttcagtaaaattgctcagctcttttttgtaagtctgatagaattcagttgtgaatccatctggtctgggtcttttcttggttggtagatttttcattactggttcaattctggaacttggtattggtctgctagggtttcaatttcttcctggttggatcttgggagattgcgtgtttccaggaatttatccatttcttctagattttctagtttgtgtgcatagaggtgttcataatagtctcagaggatcttttgtatttctgtgggatcagttgtaatgtcgcctttgtcatttctgattgtgcttatttggattttctctcttttttttcttttttagtctagctagttgtctatcgatcttgtttatctgttcaaaaaaccaatttttggtttcacttattcttcatgtggatttttgggcctcaattttgttagttctgcactgattttagttatttcttttcttctgctagttttgggattttgttcttgttcttctagttccaccaggtgttatgttagagtgttaattttacatctttctaacttttcgaagtaggtatttagtgctataaacttccctcttaccactgcttttgctgtattccagagattttggtatgttgtatctctgttttcatttatttcaaaaaattttttttaatttctgccttaatttcatcatacccaaaagtcattcaggagaaagtttttaaatttccatgtaattccatgatttggggagatcttcttggtattgctatttttattcttctgtggtctgagagtatggttggtatgatttcaactttttaaaatgtattgagacttgctttatgtctgagcatgtggccaatcttggagtatgttctgtgtgcagatgagaagaatgtatattctgtgctgatcagtgaagtgttctatagatgcctgttaggtccaattggtcaagtgtcaaattgaagtccaaaatttcttgttagttttctacctcagtggtcaatttaacactgtcaatggggtgttgaagtttcctactaccattgtttggctctctaagtcttttcatacatctagaaatcattgttttaagaatctgggtgctccaatgttgggtgcatatatatttaggatagttaactcctcttgttgaattgaaccccttattatgtacaatatgtgaacaccaaaaaatcacagaaggaatactgcttggtctttgaatttttttttttggtgatattcagaatgaaatagctatttttaagggaaagaataaagtaatatgttaaactgacaggtattttaaaaattaaataatataaaagatatgtggaaaatatatagatacacctacatgcacatacacttatataagggagaaatgattttaaaaaatatcaaatcccataaaactattcaaagatgacaaggaaaattagcaccccctgaaaacaataagttaatgttgttaagagtatgcaaaatttaaaaaatctgaacaaatactactgtgactccctttattttcaaaaggtataatggaactacttttcaacatgagtgcttgtctacttgtgtgtccaaggacctcctaatacttgtgaggttttttggttttgtttttgttgttttttttttttttgacagagtctcactctgtcacccaggctggagtgcactagcacatggctcactgcaacctctgcctcccgggttcaagcaattctcctccctcagcctcccgaatagctaggactacaggcaaatgccaacgcccggctaatttttgtatttttattagagatggagtttcaccatattggccaggctagtctcgaactcctgaccttgtgatccacctgcctcggcctcccaaagtgctgggattacaggcgtgagccactgcacctggccccttacttttgagttttaaagcaatttctggaacactttcagaagactcttgagttgtagttggttataaaagaaaacctgtatacctgttgtatcatgaactggtgtgaagtagtcatgcaactcttggctactgaatatacccttcacatatttcagcaagagaatgttttgtaaaaggtaaaaaagtcatatttttaaaaaattctaagtttatatagttttatttccacaatacccagtgcctgactctttgggtgactttactaatattttgtattgcctttatcacaggtttgctatcacccctatgtttgagaggaagaataattttaaaatttatgtatttgttaactaaatttacaaaatatacctgatgttaattttaaatgatctttaaaattaaacatactattaattattacataaaacatgagtttataggagatcaacaaaaaattactaggtttgaggttttaaggttcatctgaatgagggaggagtttccatctcattgttgtatcaatttcttcatcaaaatttcctacttcctgttctttagaaagctctaagaatacctaattaggagacaaagaagaaggaaagaaggaagagagattatcaagttgttggtcttccaaatgaacaggaaaatgcatgttgctttcatgtgaaatttaccagatgatacaaagtcaaaccacttgacttaccttctccagtgtgcactgagaaaggctgtattcttccaggttaaagttatgcttcactggaggaaaaaaaagactagtattaatagtagatgcttacaatttattaccaagaattttttcaaaatcataaagaataaaaatgtaaatcattaatataaataaagctgaataagccaatgcttgatgtaaggatgaaataatgaaagccatacagaattaatataaatatatactatgttaatattgatgttattttctcatattatgtttcaataatatttgttttggtattgcgtgcgtatgtctttggaagatacatatgttctttgaagaactacatcattgatcaaaatattcttacacatgaggaagatcctatcccatcctctttaagagaactcaaaactcccttcagccagttcatctgttatatcacctctctgctggacttccccaccaaaaagtctgcatgacagttgtcaccagattcacatatccacatgtgcatacttcaccatttatacgctaagaatctgctacatgtgaggcactcttagatggcagaaacagaacagtcaagaaaatagacaagtactcctgccttgatatagtttgcattttagtgggaggaattagtgacattaaatacacaagcactgcatatatgataaagttaatgatgatagtggctttaaagaaaaataaagttggtaaaaataaatagggagcgctaggcactcttttttaccggatggtcagagaaggccacactaataaggtaataattgaaccaacatctgaaaatgggaggaagaagcctggatgtttaggaaggagaattccaggaagaaggattagcaagtacaaagtcctgaggcaggagcttacatgtctggcagcatttaggaagaactagaaagtcatctatctagcatggaaggaacaaagcagagatatatattatgatatatattatgtcaaacacaatgagctaggcactgttctaggcacttaaaatatttactcatttaatcctaacaacatggccaagtgggcactaatagtatccatcattgcagagacgaaccatctagatatgcagggattgagtacctcacccaacgtcacccagctagtaagcagcatgcctgggctgagaacccagaaagatgggctctaaagtttgagctcttcaccattatgctgtgctgagaaattacacccaatggtctgctgttgggaatgacggggttgaaagcagagaaaatgatgacaggagagagagtgtggacaattacaaccagcaaaaggagttacacacaatgcaggggacggtcaaagctatcattcaaataggaaggccaaatacacctgcacagacacaaggaggttgatggatggatggaaactttctctgttgcttctattttattagtgaaatataaagcaagggcatcaactgagggataaaagtgggaaggaggtggatatgtaaggaaagaaagggagtaaagtaataatttgggacacttggtgtgaatggattatatacatgtaggcaaagcaggccacacagaggggcttttagagggggatgccatggtttcacagtaagaacagttaagcatgtgtgtttcctgcagcttcggtccctgcactggagattaacctcttttcacagagtcagagtaacctaaattgggattaaatctcaccattacctacagttagaattcttaaaaatcatgccctacagccctattttaaaaaattgttacacaattagcttccattaaattattattttagtattagttgattcttcaaaagatttatttgaatgtggtcactcttacctgcttctaatttgtgaaaggtctgtgatagagggtaaacgtctgccacgggcagcttataggttaacaaagaggaatacctgaaaacaggaagatgtcgttttcagctctgagtttcaaggggagaaaatgagcatcagaataaatattgatattaccaacaattttcttcttaaaataaaagtaatgcaaattaatgtatggcttaaatatgaaatcacagcattgttttgaattgctttttggtatctggctgttgcagacagctctcctggtaataactcagcataattatatatgtgctcagcttatgcaaaacctttgcgtgttgaaaatcaggtattctgaactattccctttgattagttcgaattaggttgggaattaaccccaaaataaatgttcatctttgtcatcagaaagctaattcattgttttgttttttttaatgaatgaattttttctttatttcttacatttccagcaatttgctttacatttacaatggaaaatataaacacttaaacaaaagtaaattcaggactattttgtaaaaccataaatagtggcaaatcttggagatggaggttgatattggcgaaagatctgtaaggaagacatatttattctgaaggctttttctaggccctagggcaatctagaagtaaggaaatcaatagagcttgggctgccaaccaaaaaacctcggaatctccttgattccccctcctcccagaagtctaacttgtaaagaataatatgaggttgggagagttggagattgcagtagaggaaggacataaaacactttaacaaaatacttcctgacctctaaggaagagacgtaattgatttggggcatcttgcttccgtgtgctacttctggctgtaaaccctcatgccctattcccagcttattcccaaacaggggtttggtgctcccaggtggcactaaggttgaccagatgtccaagattggcccttttcagaccagccactgctctttctgttttatcatttttgatcttcccacctatatcagaaccacttctctgatttgtgacaccaaacgtctgggaatgggacaaagttacatgttctgatatctatcttagaaaatttaattacatttacactgtgctaaaataaaatagtagcttttatgtcctattttttgatgtacttatctctccacgggaatttcaaattcagtttctgctccaccttcttgccctcccccaaataacatacagacatacacaaacacacacacacacacacacacacacacacacacagatatgtgggcatgcacacacacatacacacatacccctttccactctctattttaaggtatgaaaattccattaaagaaagactctttgattatctcaattgccatttgtttcctatggggaaaattcaccctaaatatttacatcttttaaattttaaatatttatatatgttaagcgtttatgaggaggcccaggaaggacaccattgtggtcctgtgtgggtttgagtcattagaagttccttctcccaagtctttccaagtacccctctggagctggggatcagcctgggatggccaaggagagtgtgcctggtctgccccaggggacacagcttcctgggtaggtctcaatctcttataatctggaatactgaacaaatccttttctgaggtccctaacttttattatgaagccaaatcactatgaagttctcacacagcaaaaaggaaaccactgagtggataaaccctccatatttctccataatcaaaagcccgtctcacctttcctgccctgcagcctgtgggaaaagcttcagaatctcagtgtggaccaaagtcacttgagacgtttccttcacttttagctctagaatgtaatccttgccaagtttgtttttcaggtgttggatggagccaatgcatctatgggcaagaaagagaatatgttggaaaaaatattgcccttaattttttaatgttattcttaaatttcaaatgtagaagaaaaggtgtcaccaaggaagccaaacggaagggctccagccacacacagggatttttgccctttccatgggaaatctcattttgagcatcaaatgcaggcttcggagagacacccacctaagccttccagacaccatgatggccacacggtcacacaaggcttccgcctcagccaggttatgggtggtcaggaggacacctctctctgtgtttttaacgactgcctggattgcctgcctgcagtgagcaaaaaaattaacagtatttaaaataactaagtgcagaagaaaaaaaagataaaatacaatatatgaatcatattcagatcctaatgcaaaaaaatagtgcaatgtaagtactgactaggtttttgataacataaataacatttttaagtatttttagatgtgctaatcatattgtagttgagttatcttctgaagatactaactgaaatatttataaattaaagaatatgttgctttgtatttccttcaaaataattggagggtggagaaaggaagtgggtggagatatagatcaaaggagattggttctattgatacctgctgaaacttgtccatgggaataatggattcataagcgattctctacatttgtataaaattaccataacaaagtttttgttaaagttggaaaagtatcggacagtgaccaatatgaaactagattgaagattttattattccaaagggtaaatcctagatgggaaaagtaagtaaaagaataaacccgagaaaaactggaggaacaaatttgacaggtcacattaaaaaggaaaaaaaacaaacaggaaaattgtgtcaggaagttaatagtctcccaggaaacaaagtagaagggaaaaaagaagaaacagttatagacatctcaataattaaaaggcaaaatatttttgtattttaacagtccacattaaaaacctaaaaccccaagaaaatgttgggtctttttaacctgaataccacgtgaacatcatgcagattagatcatctactggttaaatatttgttttcctgataatataaattatttccactgaatcaggaactagtgggtttgagggctgattttccaagaccagttaaaatatgcaaccttccctaatgtgcatgctcgcagctctggggtataatgatgctcaccacatttgctgctgccctgtggggtctatgcccgtagatggttcatccaggagcaagacaggtgagtttcccaggaggctcagcacaaaacacaactgcaatgtagaaaaacacccctgtttgctgccataccacaccagctctccatagagcatcacacaccgcacgtacctttctcgtgattcctgctgttaatttctgcacaggaacattcagctgctcatgcagtttgaaagcactcactaatctgacagaaaacagaatgagaatatctggtcaagacaaggtttttggaaaatccaagcacacagaacagtaacagcattagagggaagtttagtaatattattgtcaaaatcctaactcataattttaaaaaagagattggtttattttggaacatgaaagacttttttttttttttgcctcataaacagttttaggaaaaactagaattctgaatgagaaactgacaatggatgattatttcatttccaggttttttaaattagaaaactgaaatggatgacgattcatggtgattcgttcacttattccttgtcaattattttatataatcattttttaaagatctctcattcagggatgcaggaagtcaggtcttgtccctcatccctgctctgccactgacactctggaaaggtggagatagcatattgactctcggttctttattagtgaattcatcatcagtgctacagtctccctgcattctgacacaaaggaatcgcaggtcccgtctgtaccttgcgatggcgagcctcgcgtccgctttcctgagccccttgacggcagcatacacctccaggtgttccctcaacgtcagcatgggccacagcacgttctcttgagggcagtaccccaggtggcccaaaactgaactgcagcctttcagttccacctaaaaaaataaaagagctttagaaaggcatgcagcctttattccaatagcgtaattactccagaaactgacatatataagcgtctaaattgtttaagcatcaaataaatactatagaaattacttcatatatttattacagaaaatgatttaaagtacaaatataaaaatatagttttacatgcagagaagaaaagagacctaataagctcaggtagttcttgagaaactgatgagtaaaaggtaattggtttctggtaagattccaagtcctgttataaacacctgatgcccagtaaaaatttaaagaggggaaaaataaaatttatccaaaggcaaaaaaaaaaaaaaaagaaaagaaaaatagtatagtcttacaaagatataatctatacgtatcatgaaattcctgttttggaaatggaaaccatttcctcactacctctccagcagttggctttgtgatcccagatatcattctaatagatgaactttttccagcaccattgggtcctagcaatcccaaaatttcacctgaaagaaagaatcagactatcaatattggaagtgaaatactgaacaacataaaccttttgctccagtgaaatcttctgagatttctgcacccttcagttagtaccattttgagattgataacatatatgtaatccacgtcaccaaagcatgttctttattttctgtaattatgccaaatgttactgcaaagctaatgaatttgatgtcaatacatctgtccttttccccccagattacttgtttcagttggaaatgtgtccaactgttttccgtaatagatggccgatgcactgagtacatgtatgaatgattctcaaacttgagaagttagggatattttcttcatcccaaattcaaccacctctgtccaagttaccatcatctttcatcccaactgatataaaagcctctgaacttgtcccccccaacccaaactgacaaacaaacaatagccaatctgtaatcttttcaaaatataaattaaatatgacacaagtccgctaaaaactctccaatggtattatgctaacttgtataaaacacaaactcattgctgttttcaaaagctgtacctaatctggcgctgctcagctctatagctttatcccttccatttatggatgcattcactggcctcttggctagagacacaacgtttccaaatgtgtctgagtccctgccctcactgtttcctctacctggatgctctttgtctagtggcttcataattgtatttccagagtctaaaacactccctggcacactaaatatatatatatatatatatatatagaataaatgaatgaatgcttcagcgagtaaaactgtgcctatgacatagatgttcggtaggtagttctaaaagtaatggtaagttttaaaagggattattacagaccttcttgaacacagaaagagatatttcttgctgctattttcttcttcctctttgaaaagcaacttttcttctggcctgcatattctttgtgtagacagctggcaattataacaggtttctagaagagatgacagcatgattttcctcttaaatttcagagactttaggtctctgctggaacctttcatgccttatgtcataagccaaaccatattttgagttgagagtaattcatgctgctaaatgtaatatgcattcattaatgtagaaaatatttcttgcttctaaatagactgagtttcatggaagcagcttattgtcttgccagaagaggggtggctaacctcatggaaccatcacatctaagtcaaatagagtaaaccttaaaatcttaatctctatttagcattcttcgcattcttcgacaaatctaacttaaattatttaactcatgaggtcttgttggttttgcaattatagccctaattatgaaagcccacttttctcaaaagaaaaattaaaaccattaggttttgtgttctttttagcttctaggacactctgaataagcggagtgccttgattatgcagatacttctttggagtgtcctggacgcataatacagaaatgcaccaaactccaaactctcaaaatgaaacccagtgtatcaaatcctgctcttgacagttcttgaatatctccattaatatccattttgccccttgcttttttacctcatctaagattgaagtggtcagagcagtggctgttcttattctttctgtttgaatatcttcatcttcatctatgggttcttctggatttggcttagcatctctactttggggggaaattctatggagaaaatgaaatgtgttacatgtggtattctagctgttaaaagatgtgtcaaaaatcagcattcctgtgattttactactgtcctcttctctaatgtgcaggtgatgatgtgatgatgactgtcaatattgcttctgcttttgccaagaactcctgtcccactagccagaatccttttcttaatgttgttgccattcttctggtaagaatctttgaccctttcaaatctgtcagcaggtactgctcctttctctttaaaattcatgtcactctcattttctctactcagtctgagctcatcttcatcacaccagatgttttttcaacatcatttactgctcaccctttctacagccctccatttttaaaacactcaactatgttgctaaatcgattccttcccatcttttcttttcaaggatgcacaattatctcagacgagagaatggcatatttgggtccttattaaattttggatggagtgaaggtttcttacagctgcttacagccagaactctgcctgggagttctatctcttggcagtaaggcagcaatccacattccctaatgacaatcaacatgtgcttccactgtaaatgtaaatctgtattaacaagatgatagcacagacaccatctaggaatgttaaaatatgatattaagtataaagttaaatttcaccccaacctgaaaacaggatcttttcgcattcttttctttccacattttagttccatgcatcttagaacaaaaacgaatagcaaagtctgaaagtagggctatgagcaaagaaatacagttatatttaggcataagttcacaaatattatttaaatatttgaattaagttggtggtgttttgtctttgggtaaatagttgtggatcattctcataagctgggggagaaatgtagctatacattcacaatccaggttagtgaaacctgtttcctttcttctcgccacccatattcagtttgtaagtaaattctatctactctatcttcaaaattatccataacccaattatttctcacccctactcatgatactcccacccaggcctaggtcattataatgtctcacctggattgttgcaaccccttcctacttgggctatctctgcccctcttgttctaaacatctgttctcaatacagtatcctgagctacttttttaatacataagcctgaacttatcactgtgcttaaaaccctccaatgactcctcctccatcactcagagtagagtcaaagcctttagagtaatctagattaccctgtgtgaccctttctcctgacctctcgctttatcccatgacttctgtggccatctttcttatcactctcttccttggtcattcagtcacaaccacactggcctggctgaccctggattgagccggggtcactcttgccacttcctactgaagtgctcttctcgaagcctttcctgaccacccatctgacaccacacatattatccatttagtttattatccatgtccttccaccagaatataagctccatgagggcagggaccgctgtctttattttctcctgtacctagaaaagtactgacacataggattcaaagacagtagttcccttcagcctaaatacaccaaaataatcattttccctttcacttttattattcagttcttgcctttttaatctattattcaaaggaagtaagttatattgcatctctattttttacaagctctctcaaatttagaggagggacagtaaacaggataagcaaacaaaaaattaatttaatattaacttttggacacatatagccaatccaagcatgtaaaaagtaactctaaggtttagaaacatgtctgaaggtaagtgctttatctaagatcatataaaaacactttcaaaatggcacactttggacaagatcaaattgttatagtgaatgacagtcatccaaaagaatgtgtgctgaggtggaaagcccttcttactatgaagcagactagaaaatcagtggcactcaattcaaaatttgcctctggaaattctctgtagtgctcctggtctctctgaaaagacaaaacaaaacacacacacactaatgataattcatctgctttatgatttgcacttaaataatataaaattcacatattgaatattttcctcatagatctcaatttctttgtgtgcactagtgacaaagtaattccccacagaaaagagaacctcctactcaactcttactgtctctcaataagcaagtaacctatgtctgttcctctcttcaattctttgtttaaaaaaatttggttttaacatttgcagaaagcatatgttattactgaagcatatgttattactgaaacagtaatatgctattactgaaagcatagcagagagaggtgctggcactggtaaaatttctgggggttgacaatatttttcttaagtgccacagacaagccttttcagagccccttcttatcccaatggtgactattttcccataatgataattagttccagcacgttattctttcttcatcaatcagttcattcagaaagttactcattcctcctatataatacatgacagatcaagatgaatgtatttcaccttgcaggtctacttaggaggaaaatgctttaagcaaagggattagtttctaatcgagaacttcaggcattgctcagccaatggagatgtatttttgcaaatggaaggcttttccagttcgccaaggacacccctgattacagaagccctctttactttccttaaagccatttcatccagagtggtacagagctccaaaaagtgtgttctccacttaactttcttgccctggcctcatcgtatacttttctccacttgaaccacattcagtttctttaatgcctcctggcttttcctgcttcaaggcctttgctttcctctgcagaacatgcttacctcctgtcccattaactaattattattcatcctttagccatgtatttaaatataacgtccccagaagaattgtctgactcgctagaacacaccagctgtgccttgtgtgtcctcccttggccctttgcccttgtcctttgtaacatttaagtttcttgtattaacttgagtaagtttggtctgcctttgcctccactaagctttgggaaagtcaggactgtgctatcttgctcatcaggtgtccccagttactagcacagtgactaacagagaatagtatttgatatatatttttgaatgattgaatggaatcgcatatgagtttatcctcagcggctaacaaattacctgtcaaaccaagcacatttttcccccaatctggcattacccatatttgaatggcatttgacaatgcctatattttgcaaagtgaataggacaaaagtttaaatgttttattgagatttaattttgcatctgataaaattcactcattttaagagtagaactcaaggatgtttagtaagcttacagagttgtgcaagcatcaccacgattccccttttgaacattttcatcatccccccaaaatctcttatgcccatttgctgttactccccagttccactactttctgtctctcttgatctgggaaaagcactttaataagctacatattcaaaattaatgacacagttggtaacatttcttaccacttccaaaaaagttttaaatccaagcaaggtatatgaaggaaccaataccatggtggtaatcaatatacttaggtcaaaatgattgattaaagtgatggaaaacatgatggtggaggcctacaaggcaagttcaaatatattgtatcagacatactcaacccattgatattttgtaaaacatttaagatgcaggtgttctcatgatgtatatcataatgttcccatatgcagatatacccatttgacaatgatagtttctccttttagagacaatagggaagaagcttttgttaacaagaatacattatgatccccaatagaaaattcttaataaagactggcgactaaggtgaaagctaaaatgaccaaatagacttctttttttttttttttttgagacggagtctcgctctgtcgcccaggctggagtgcagtggcgggatctcggctcactgcaagctccgcctcccgggttcacgccattctcctgcctcagcctcccgagtagctgggactacaggcgcccgccactacgcccggctaattttttgtatttttagtagagacggggtttcaccgttttagccgggatggtctcgatctcctgacctcgtgatccgcccgcctcggcctcccaaagtgctgggattacaggcgtgagccaccgcgcccggccccaaatagacttcttgacgtgtattattaaatttaatccaagacaagaggatagagggattacctttttatggctaaggtaacaatattgctaatgaataaaaacctgtatatgttgaaagttacatggctattataaaaaaaaaccaaacaatccatactgtctctcaaccagactactgtggagctttctcattgtccttcctgctccatttcttccccattccaaacaaatgacttttctgagattgtgtatttttattgtgatggacttattttattttacaattttttttactggcaaatgggaaggaataaggataattttgtttgtttgttttaagaatcaattgatcagccaagtatgtattgagcactaccctttctttcccagatcttattaatgtactgattataataaaaatagaatcataattgctaaattcactgaatattacataaatgccaggttttaataatctagcatgaattatttaatcctcacaactccataatgtagtacttttattatctctccctttacaaatgagaaatctggggttcactcttaagtccttcagttcacttagctgactcctcttattctaccagacctccatatttctacagtttctttcctctcttctcatccactggaacaagagaggagtctaaactttgacagtgtgagaggatactccagaactccgtgtgctaagatgtgctactatacctccaccacacagcataataggctgaaaagatacttccttatcaggcaggggtctagggtaccagtaaagcaccacaaccctgggggtatggaattccactggactctagaaacaaattaactactgactgtggcttcactcaatgatggagaaacattgcctacactgtccttccaaatggatcccagatcaccaaaggacaactgcattgaatatcaacatactataccttctgacatatgatcctgtgaggagtaaacaaattgccttagtcctaggactagcatcgtttaagttgatactagctgtacaatgataaattctcacaacatatattttcaacacatatttagaaataaattataagttatttgtatgcaaatgcaaattttagtgcaaactgcttgaggtctttgtgaagaggtataattttaaaactttttagcctactgaaatcaagatgtgttcatcagcacaagttctgaatcagtattgccaaccatgctactgtctcatattttttaacatgaggaatgacataaggtctgagacttcaagtttattcctgagcctgtcactactttttgtgtttttctgagcaagttactaaattttttcctctattgaagtaggaaattaagaaaataacagaataatggcataagtaataatagtgaaaattatagtaacagaaaaataacaatagctcatagaatgaattgctgtattaaccaaggctgaaaagaatttaagttgcgcacccccacctccgccgaagttaaagttaaaagagaatactaactgtcccaagaaacattaaccatatctacttcccacatattctgtaagttctgtaagtccctgtttttcttgctgtgcagctgcaaggtcacaagataagtaagtgaaagttaaattgcaactcatatttttcctaagatgcaagtcatggcataaatgataaacagcctttgttctcacttctgcaaacctgcttcctgcttcaagtttttcccgccccaaaatgcttaaaagttgctcgctttctttgttaggggctcagactttcaggacacatgtctgctgagccgatatacacctaaaataaaagctctcctgtatcccgatcggtctctctagttccttaatttcctgcaacactataaaatttggtaaatcatactagacaattttgaatttctttcaagtctgacattccaccattctagaaatatgtagattcctttcagtgatagaaaaatgaaataaataaatatactgaaatagataagcataagaagggcaaaggaaaaacaatcagaaattacaaatatataaatacatattttactattacactgcggtgtaattttgtttttatattttgaacagtctttgttttccaaaacgtaccttgcctctggaatattgtcttgccttatttgaatccataacaacttaagcataaatggcagcaaaggataaaaggcatgcaatcatacgtgtatgtgttttgattttaaaaatacagtgtttctcagtgtcatgtctgattttctgctgtgatcttttatttgtgataattttttcaaatcacagtgagaacaccttaatcaccatgttagttcacaagcctaagaagtggttctgcattatcatctttccttagaaagaacaaagtcaaatttcttcttttgttcatctattcacttgctgccgtatatacaaggggcattcataatatgataatgcagattctgtcttctgccattttttgaaggaaagttcctctcactggactctcactccttactccacaatgggaaaatggtttctgctctctaagcctagagatgaaacttattgttttggaagattctggcctattaagttctagaagttctgtcacagtctatggaattgatgcacagatttgaaatcctggaacttggctgagaaaatcttgtctataatgttttccaacccaaagcatcactatggagcctgcagccatgaggaaattaaacctgctcagcttctccactaaaagctaaaaggcaagggctgaggtatgtttctatcactgatgctgaatgctctcttgtctgagaaatttccagctctatacaaactgggataagttgtgagtatacggtaagccaggggcaactatttcatgaggcacatagcaaaaaatgtgtccatctagatgtgcatttgttccagtttggaatgatttctgtgtaataagggtcaacacaaggagtggcaaaagccacaaaaggaagcttgattccagcatgctgtttacttaggactgaaggacaagctgctgaaaaagcatctatgaggggcactcactagggcatctgcagcatcactcaggctggcaggagcagacccatgcgcaaccacgctggacaataaccctgacatttcttggctatcacctccaaggtagacttcgttcagagctaaaactactggcaaacactaagaatgaatgtgaattctttgttcacctttgctagacagatacaagagtgctgactgaaaagaaaccaaccaagtgtcagtaagactctcttctacagacatctgatctagcacctgagattacactggacaatggcagtaagtctgttgactgaacaaaaaatagtctccatggaaaggataaatggaaagaccttttgtgcaccagatcctcatggctgcctcaaagccagtttttccgagtaaggtgagcctaatgttctttctgtagcctctgtacttccactggattgtgctgatggtggtaagagatatagttatagacactgtttgctgaatacaaagaaatatagcccagagaagtcaaacccaagtgctgtccactgagaaggaacaacagctacctgctggccaaaagagtcccagactaatttcttgtagaagtcagtgggtcgtataggttggtgcaaaagtaattgcggttttgacattactttaaatagcaaaaaaaacgcaattgctcttgcaccaacctaatattaaatatatcatttcttatagatgatctttggttgggttcttctcatggattcaagattcccattccaagagttgagagctgttttccagacagacattcaatcaccagttgaggatatcagttaaaggaggcctgaagtgtaggactcagggcactctggtgtctctagaatttcagcaaacatttccagcaaagttttccatgattttggacaagctctttacttttatactaacaagtaacctggcataagtataaaacatctttagtatctgaaactattagcagctaaggttaagagagaccttcttgaagactgtagagatgggttgtaatgtcaactgttaggaagccaattttctagtgttggcaggaagccctgtattctggagacataaactcaacaggacgtttcagacgtcaggtcttctgtaagattctccataaattctgttcaatgggtagcacctgatttctttagaaatattattgattcagtaacagtgttacacttccctctcttttctatggtgtaattttgaagtattaattttccctactgtcttaaggcagacatctgtatttaagattacattagaagtttaaaaaataacactatttctctatttgtatgtattatatacttacaaaaaagaagtaaaatgaccaaaggccactgttttttctccttttgcgaaaaataaatgatatcatatatatgaagaagacaagagaagctgcataaccaggagtaactataacctgagcataaaagaaataataacatagtcaaaaaatcaaatattactgagggaaaaattagattacaacttttaaaaaacaagtaacctggcataagtataaaacatctttggtatctgaaactattagtatttatcatacatgcactttgcatgttttttgttttggtttattacaaaatatgaattaaaacatcttaactacttaaaataacaatgttaaaatttattattaattactttatgaaatttggtttatgtactgtgttacttaccaaagcaaacacaatttggcttgtaataagaaggtactgcatgttttctatgtagaaaattaaatacattaaaaggagaattaaaatgaagaagctgacgtccactagtgcctgcccacaccagtaagcagaagtgtagaggcctgaaatccatagctgggacttagcatttttctgattaaaaaaaaaaagaaagaaagaaatgtatatagattcaattaaaatgcaaatctaaaataaacacaaacacattggaagaatttttaagataaatataatctaatcttctaatattaaaaaaaattatgcatatactgcttagtaacatgaggcttatagagccagttccatggtttacaaggtgtctatcaaaaataaaatgtatactgtgataggcctgactcataacacaactttagctcatgaataatgaaaagtggacctcataatgttcaaggcattaaactctataaaaataagtattggccagcatggtggctcacgcctgtaatcccagcactttgggaggccaaggcgggtggatcacaaggtcaggggattgaggccatcctggctaacatggtgaaagcccattttgactaaaaacacaaaaagtagttgggcatggtggtgcaagcctgtaatcccatctactcaggaggctgaggcagaagaactgcttgaacccgggaggcggagtttgcagtgaaccgattttgcaccattgcactccagcctgggcaacagagtgagactccatctcaaaaaaaaaaaaaaaaaagtattattttgtgacctggaggacataatacatttacctttacctaaacatcttggagagtttctggctcaggatggtgaacgttgatagatttaactgctttgtctgaataatgggcataatcgaatacaaatataacataaaattgcaatttccagagtggaaaaggaattcaagtcttaaatttggcctttgatttcaacatcaatgatttccttcttgtggctgggaaataatgtggtcaaaagatttataatatttccctttgaaggtttagactaattggagtctctgaaaaatcactgtacttttcaggtgactttggaataaaaagcattttgagtttttagaagtaaattatctgacttgccaagaataaggtttagctacaatatctaaattaaacatacattcaaatgtttttgtcagaagaaaacattttgaacacatagcattcaaaatacagatattgaaattcctgaaatttcttcttttccctgctttttcttaccttgtaatcactgatgctgcccatggtgatataaggagaaatgctacatagaaccaaaaataagaaaaaggaaccatccggcaacccagtccagagtcctatgtggctctgaaaatataaagggtagcttaaactagtgaatatttgttaaatgaaacaaataattatagccacaaaaatgcactttttgaaatgttgaaaaatcaaagtaaaggtgtagctcattaccatctaggcacgaaggtgggagggaaagtgactctgatcttcaactcaaagaacaaagagaagtcaaaagtcatttaggacctacttctggggatatttccaaaagaattgaaagcaagctctcgaagagataccctcacattcatattcataccaacaatactcacaagtggaagcaacccaaaagtccaaattaatggattaacaaaatgtgtatgtatatacaaacaatggatactattcaaccttaaaaaggatcacttgaggtcaggagtctgaaccagcctgaccaacatggtgaaaccccatctctactaaaaatacaaaatcagccaggtgtggtggtaaatgtctgtaatcccagcaacttgggaggctgaggcaggagaatcgcttgaatctgggaggcagaggttgcagtgagcagagatcgccccattgcactgcagcctgagcaacaagaacaaaactcggtctcaaaaaaaaaaaaaaaaaaaaaagaaggaaatcctgtcacatgctacaacatagacgaacctggaaaatatgctaagtgaaataaaccagttacaaaaagacaaatattccacttatataaggtttctaaactagtaatattcatagaaacataataggatggttatttccaggggatgggggagggggaaagctaattggcatcgagtttcaattccgcaagacggcaaagttctggagatgcatttcacaacaatgtgaatatacttaatactactcaactgtacacttgcaaacagctaaaatggtcaattttatatcatgtattattaccacaacaaaaaaacaataattcagaagttaggacctctgatgaacatataattcaggcctgagtagcacgtctttctgagcaaacccagagatggaaacctcagtagctgggtggatgtgttctgaagcacagaaccaagaagaaaacttgttgctgcttgtcttaacttcagggaaaggaactttaaatcactacccccaaatcagcatccacttgaggctaggccaagtggacactctagcagcatctaggaccacctcatggatataattacaggataacagcatgagcctgtctcaaaataattccacaattatttaactttatttaagactttgagggctatgtctataaattctgtttttcatcataggaatgagggaggaaaggtgtgtgccatggggaagtgggagtggggaacaggtttctaatagagtagctatgggcttcagtccattttgatcctgagcaaacacaatggcattaggaagctaataattcagaagttaggacctttgatgaacacataattcaggcctgagcagcatgtctttctgagcaaacccagagatggaaacctcagtagctgggtggatgtgttcttttgaaggatagcagcataagcctgtctcaaaataattctgcagtgagacaggttcatgctgctatcgttccaaagaggaagggtaatcactgtctctttctgctactcctctggttccactttctggagaattcccttcagacaccccttccctcgagtcatcctgtgcagcagacctgtttacgtgatcagtcggtcatactcaactcacggaggtatgtgtctgtcacgaacatctcaagtactgtatatttcatccccattgttcccatggcttacagaaaacctgtgcttgcatatactcccagcaccactgattcagtgaagccaaaactgagcttcacacttttgtcacaaaatggacttccctttggatggcttcatttctaatcctgcttcttgatgtttcagacttctggtgtgaaacagttggagtcagctttgagacacccctgttggtatcaggcagggtctaaccagaaaaccatgactacgttaagttcttagagtgcaattccttatgacatggttaggtgggtgatgagcatcccacaaagatggtgaagtgagaagcaagctattgttgcttctgggcttcaggaacagcagaaggaggtgatgtgactggagcccaatgtagggggtcctctgctcttctgtctcccaccactgctttctagtgtccaaactgtctgaagccagactatagccaactgacacagaatccaatgcagcctgtgtgtattaggctccctcacaacatagagcaactatgagtaggtgaataaataaatcaacagatagccccagaactggcagattctccttcatattagtctgtctactacacatttagtcaatggagggtccactaactaattataatagatttatatgtaaccagggttacaagttctcctgatttccaagtcagtgttttcttttttctgtttctctttctcatacacttccacaatcaagtatgtacaacttttcaaaacattgcctagaagactgacaaaatattgaaaagtattccctcacgataattatctgataacttggcaggaaaaaaaaatcctgttttgtttgctataacccattgaaaatattaggataaaataataattttcaggcttaacaatcacttatggatatttaaaagctaaagagagaaaacataggctatttgtccaattcttaattgtttagactcagtaaatccaatacttacaagaggaaatgggcttgactcaattcgaatatgttgtgtgtgattaaacatttgaagtagcccattgctgataatattcataagaattggaaaacagtgcaatctcttggtattacacacaactgaaaatctataatccttaaaacagaaacaaataaataatgttaatgctaaattcttaaagaacaaaggcaaggtttatgtataaaagatcctaacagtgccacatgcttgttgtgtgtccatcttcaagtgaactaaactttctgagctttaccttcctcatctatgaaaaggaaatactaaatgggttgttatagggcttaaatgacactctattcatgtacattaagctctagcacagagtcagcatacaatcaatatgaatttttatttgtattactaattttagataattttgtctccattttgctgatggggaaatttcatttagtagagtttaaaagtctccctgacaaggagatgctgtcagtttatgatgaagaagcaaaggaagattgggcatggtggctcacacctgtaattctagcactttgggaggccaaggcgggcagatcacttgaggttaggagtttgagactagcctggccaacatagcaaaaccctatgtttactaaaaaatacaaaaattagccaggtgtggtggcacacatctgtaatcccagctacttggaaggctgaggcagaagaatcacttaaactcagaaggcagaggttgtagtgagctgcgatcacaccactgcactccagcctgggtgacagagcgagactctgtctcaaaaaaaaaaaaaaaagcagcagcagcagcaaaggaatgctggccttctggataggagataagcatggagttcattaaatattcatccttaccctgccaaagaagcatttccccacttcctaaagcaatctttatatttatgtacttcatgtttaggaaaatgttcattaatctattagaaggtttattgtttaaatcttaccactagttcatgtagtaaatatgtgaggtatgtaacgtagtagctgacaaagtaatttcccaaaactggcacaaagcgattacattttttatagcatatttagtttatgtagaacggaattcagtaatacaacttcaaaggcttttcttttttaaaaatttactttgtagcatgaaataaagagggagcttcacttaattaggccccttgcttttattagaatgcaaataagactgaagagttcttaacattaagatgtatttttaaaccgagcacggtagcttatgcctgtaatcccagcattttgggaggccaaggcgggaggatcacccaaggtcaggagttccagaccagcctggccaacatgatgaaacccactctctaccaaatattcaaaaattagctgggcatggtggtgcctgcttgtaattccagctactctggaggctgaggcaggagtcactggaacatgggaggcagaggtgtagtgaaccaagatactgccactgagctccagcctgggtaacacagcaagactctgcctcaaaaaaagtattttcaatagtcttgttctctaatgaatctctatggcttgactcttttacccaaatcgacatatgctaaggtagcagactgagaatacttttttctcagttatttcgtgtagatattatagtatttaatgtattttctcaatatataaaaacaaactttattcaggtagttagctactgaataaaattccttaaatccataattatattggttgataattataagctataatatttttattgagtttaaacagtacaattaaatttagatcctttcaaatgtaaaagttatctaattcaaaacaaaactaagatagaaaatgttttacaaaaacttaggtaaacttcacagtttattaaataacaacccagaatgtttttctgagtcaagtttctgtatactagctttaatttctgcagttttaaaacagctaaaatgtagtactttttgtttttttcataaaagcaaaaaggcaaacataccttttgtttaccagaaactatgatagctccattgtatgagaggccatcagtaccatttctgttttcaaagtcatctacttccaaaagtatattttgatgcttcagtgattttataaaatcttcaatatttgattctaatatgaagttaataagagaaggccatagaaaagtaagaaaatacatatcaaacttttaaaataagtcatatacataattaaagttaatatttatggaatactatgtataaatgtctttctttgggtatcacaataataatattgacccacactgtaccatcttctatttagcaaatcttataccacaatgaattagctttataaatctgtttaatgcaaattaacatgtaatcataaaaataagctaattctattgtatgacttttggtaaacaacaacaacaacaacatttgaattgaataatctgtggagatacaataattttatgaggagtacttcagattgtccagcctaaaacagccaatgataacactcttctctcttccttgttcttccaaataatggacaagtaaatatatatgtgtctgtataacacatacatatgttttactttattctaaacatttacgtacatattccatacatgtatgttgtataaatataatctttcttaggaaatgaaaaaggatgccatcatcagatcaaacttttagatatgaccctgaagaagaaagcagatgagaacgtctgaccgtgaaatacgagctgagaaaaattcacagcctagagcacaccagagcaagcagctgaaggtaaaaccaatttccaggatacctgaactcagagtggatgaatgcaagggggtaaggtatgctctgaagctatagtcagggtcgtgacgtatacctgggaaaagatgacccgtcaggcccctccccacgttccacacagaacacacagtagccgcagttgtccccagggtaacagtcccatatttacttactgagagaccttatctgaggagcacagctgggcaaacctgaagtaactgcagacaataatttgagcaagatggaatgaataagaggaaaagaaggactttttttttttttgcctttgaaatgggagtttatagtgggctctgggattggaaaaataaggccaaaccttagatgaattaggatcccccaaccaagtgatacaggaacatgcacatagaaaataagctttccatgcaccttgagcagccacacaccccactccacctccacagtcacttgaggtgcaatgccatatggtgacccacattcacctaggcagacagggatgctcacattaaaagataaacgtgttaccaataattggcagattttgagaaaagaggaacaaaatggcacagaagcttcaaacttaaaccataaaatacctaagtacagagacaaaataaatatattaacacaagcccactgccctcaagagtgaccaaagaggaaaagagagacctaatttacttatcttatgagctcataggtaaagaaacctttctagatctcagaaattaaacatacaattagcatttaaggtagtgaggtgaataaaatttactttccaaaacccaaatggaaaacaagaatgagaaacggaaagggaaagactgtctttgtttaaagagcatacaccgcaggcctgaatcgcaaatccatgggaaaatcaaatgaatgaggaactcagcaagggaagactcttactgtgattttttttttgtttctttgtttgtttgtttgttttaacatctgaggtactaacataaaagttccttcttcaaagttaattaagcggttaggaaaaaaacaaaaaaacaaaaaaacaattactggccgggcgcagtggctcacacctataatcccagcactttgggaggccaaggagggcagatcacttgaggccaggagttcaacacagcctggccaacatggcaaaaccccatctctactaaaaatacaaaaaaaaaaaaaaaattagtcagacgtgatggcacgtgcctgtaatcccagctactcgggaggctgaggcaggagaatcgcttgaacgtgggaggtggaggttgcattgaaccaagatcacaccactgcactccagcctgggtgacagagcaagactctgtctcaaaacaaaacaaaaacaaaaccaattacccattgtttgggataacaaaataaggcatcttcctgtatcttgtacttaatgaaggggcatggggaatagataggccatcttcacatggtaaccagtgtgtattgcctttgtggtataggttaggctgctgtgtaacaaagggatctcaaaatagaacgggtgtgccaatatagaagtttatttgccatgtaatagcttagggtagtcaggtagagagacgtctttactcttccaggttatacagtgacccaagttctttttctcttgtcctcatcatccctgtcatctccaaaatcagagtaaatctgcactgttcctcataaggtgttttctataaatgaagtttaaatacccattttcttctcttatgattcacttcccccccccacctcctgtgctattcaacaataaaaataacttatttctggatttaaattttatttttcttttcacctgtgttattgatgatcaacaggctggtacggggttcctggggaagttgtccaggagagagaaaatacaattcgtttttaaattcccaatcgatcttttcatttaacatagcatacattatattttcaacaatcaaagggaatattgcgattccaaataccaataatctaaacaataaagaaaaattagcatattaatctccaggaattttatttatttagtaagacattccacaagtatttgttgagtgccaagcctgccttatgccaatcatgattctaggtgctaaaattctgaagataataccctagcatgctacacagtaccagaaggcattactatataaacaccaggttatcaaaccatgaaaacaaaacacacctgcacgtataagcttaatcgagtgtgaacatacaggtattcccactgtcagaaaaattaaatgctgaatttatccaccccgtggcaggaatgtcagatattgcgttctagttttaaattatcttctggtttgaacctcttttgaaattcatgatctaacaaaaccacagtactctcctactcacagggtcaataacactttagtttgacgttttaactttaagaaacggagccgtgccatggcaaagacttgcattctccagaggcccatgtcactcacagctgtctgcatttcagagaaggaagagtgagccagctccatttcattgaggctttctgagtctcttatcatctccacttgttcgaaatctataaacacacacatacacaaacacacatattataatattaatgccatcctggaggcatcacagattttccttagtaatattaaaaatagtattacatggccaggcatggtggcttatgcctgtaatcccagtactctgggagaccaaggtgggtggatcacctgaggtcaggatttcaagaccaacctggccaacatggctaaaccctgtctctactaaaaatacaaaacttagctgggcgtggtggcaggtgcctgtaatctgagctcctcaggaggctgaggtaggagaatcgcttgaacctgggagggggaggttgctgtgagccgagattgcaccactgcactccagcctaggagacagagcaagactccatctcgaaaaaaaaaaaaaaaaaaagttttacatttgtttttatttttataaccaattcaaaggaattatttagacaatatttttcaatatttattgtttatacttcaccactgccatctatattttctttctatagtgaagttttataattgccaatggtgataaaaaattaaaattttaaataaaacaaagttttagattgcttgtggttacagtgcaaacaatataagaaacatgttatgatgtccatattctatactcagtgagaaaatacactgaattcataccaaaagaataattcacaaaaatggtgatctcattgtgcccaatctttgaaaagcaaagaaattcccaagagtatcattcctctgagggatttttaaaaaatcttctgcataaaaatagccaatcattacacctaaatatctactactaaggtatcaatcatttagtagtataggggaaagatcatcagctctgaactaccagatctgtacatgtatcttacatctgtgattggggaaaatcacttaactgctcataggtctgattttctcatttgtaaaccagtgccaatgacacttcttggaaaggttattataggaaagataatgttgaaggcatatatatcaatgtatagccatacattaatctaagtgtctggcataagaggagctccataatgacaatgattattatcacccattaaaatatacaagagtggatactgagaattctccccactaagactttagtggaattttgtatattaacaagctaacagcaatttttatttttaaaaaatatattcagacctcattcccctaattaagagcctttcacagcctgaaggtatctaagaagcagggaacatctgaggataggaaatagtttccaaaaggaaacttggtagatgccatgaagggatctgtgatcagtcttagtaatgacgctaagaaataatgacagcccatctcaaacagcagagccaaatttggaatgaaatcacatttcttagtgtgaatcacccataagaaattataaatactaaattgacacatgatcatttgggaattggttttctgtgaattatacaaatggctttaccttgttcgatagttgactgtccttccagtttcataaagacttcatttagagttgacatggaaatgtcataacctgtcactccctggtcagaacacttatccagatcactgaaaagatctaaggcaaaaaaatatgaatagatactttggaaaaccacattgagaactaaaccaagtaaattaatacttatttaaaagacaatacataatattgttaagaaaattatgtccttggagtatcacagtagtcaaaagcaaaatttcatgagaatgctctccttctctgaaatgactaaggaagacctcttcctccatcctcaaactgtctcacttcatcttccattctcagtttatgagcttcctgcagatttctctgcagaaatctgaacaatcagaaagaccattatcttctcacctccacactacaaacccacgtatatctctacctatattctgggtcttctctctgtataagtctttcaatgctttctcaatgcatttaaaataaaatttaaagtcaataacacaacctctgaggctccaaaagagcctgtctccatctatccacacagccttacccacctccatttgccattctgctccctcactcattgccctccagccattctcctttccccttgacttggagtgcccttgaccattttcttcttgtggccttcagtgaccactctatataaacctcagccagacaccagtcatcactctaactcactggccttgtttattattttagtgtacaattgttgaaaaattttgtgtattttgtgtgtctacttttccctatctagttagatgtaggctccatgagagtagagacacatatctcttatttaatgtggtatttctagttcctggagcagtgccatttatataatagtttcccagtacacatttattgggtaactcttctatggagatacttgcatgagactgcaggattctagaagactcttagatgctactttctagtttgggtgggaggatgggccaatgacattattgagaggaaagaggtggatgagactgtagcaaacactgtgtttccctatgacccgcacatggcagcaatggacctgggagtcccatgtccggaaatggacataagcatgccattagacagcagaggccttgggtctgtgtaaagaggctgccatgggccaggaggtcaacaccagagactctggcaaagtaacatattccagtggtagtaccaacatataattccttattctccatctctgaccaaaaatgaaagtggaccagttgcacctcacagggccttagtccaagaacaaaataacatggcatagtccactgatctgagaagaacaccatcttctatgctactacaaggacatagagagctgccacattggggagtgaagctaaaatctgggaattcctgagtatttgcctaatgaaaccgaattatgcaaaagagcttatttaaggtaggtctatagggagttatacctttaacaaactagatgtttaaaccaaagggaagctgtttaaatcaagagactgaaatatatttcctcatttgtaagatagggcaagttatagcacccatctcatagaaagaacagttgtgagaactaaaggagttaatatatatgaaaccattagaacagtgcctaacacgtagaaaacattacacaaagagcaagtaatctttaggatttcttatcaaacaaagtctgaatgggtgctgctacccagttggcagggaaccgagggttgaacacttttgtagactatgtaagttgtttttctctgcaaaatagtacatgcacaattaaaatagagtaatcctgccttatctacagtttcattttccacagtttcaattatccaccatcaactgctgtctaaaaacataaaatggaaaattccagaaataattcataagttttcagttgtgtgcccttgtaagcagtgtgatgaaatccttcgccatcacactccatcttgctcaggctcaggacgtgaatcatcccctgtccagcagaaccgagctatacccacctgtcacttagtagccctctgggatatcagagcaactgtcacggtattgcagttcaaggcacccctattttacctaataaggttcccaaagtgcaagagtaatgatgctggcaatttggatatgccaaagaaaagccataaaatgcttcctgtaagtgaaaaggtgaaagttctcaacaaggaaaaaaaaaatcttatgctgatgctaagatctaacgtaagaatgaatcttctgtctgtgaaattgtgaagaaggcagaagaaattcatgctacttttgctgttgcacctcaaactgcaaaagttacagccacaatgcgtgttaagtgcttagttaagatagaaaaggcattcagtgtgtaggtggaagacatgaacagaaatgttttccgatcgatggcaattaggtttggttctatccacggtttcagacatgaactggagatcttggaactatctattccttgtgaataatggggggctaccttacaaagagaaacctgtagcagaaacctttatgccccaccaacacctcttctgcattcacctgtacacggtaaatctgcttattaaaaacacctacctgaggtcctttttctgtacttggaagtattctaagctcatgttcagagtaagccagaaggatgagaaagttaatgctctcgtaggcatcccttaatcaacaatggatagggaacagtgggtaagaaccccagcttactcacccctctggtgacaaaacgctgagcccacttacttcatttatttccctcccgtgggcattgcacctcaattgcctaccacagtaatctgctccagaattcagacttccctggctgccttcccttccctctctcctgtccccattatctgctggtgcttccacgaagcaactacccaataaatcagtggcactcaatccttcctcttgagttctgcttctcaggtggccaaaactaagaaaaagtctaaattcattggacaaagaaaattattttaataataatgtgaacattttttcccatatttcatttcattgtaatcatagttgagttacctggaaatgtatttgtcctttccagtggcaaagtatatacaagcttttctttgttttctgtttttaatttagcatcggggatgtgatgagtaatgaaggatgttatttgttctgggttacatatttcattcctatgtaaactaatatttaaaagaaaagataagtcatttgcattttctccaccactatcacaaaagaagagctttaattgaacacctagctgttgagcacaactttacttggctttatggaacaaaaagatgagtaaatactaacatgatagtaatctatcagtttgaaaattttataatctatatatggaaaatgtataagctcagaacaattacaaaatatacaaacaaatatataatgtaaatggaactatatagagttttatatgtatagttatagataaatgtaggaagctgagaatgttaggaagaagagacttcttagggaaaataattattataccagaccatatcattagctagtagagaaaatctggcccacatgcatgctttgtttggccatagggttattttaaacaattattttagcctggatatacaccaatatggtttggctgtgtccccacccaaatgtcatcttgaattgtagttcccataattcccacatgtcataggagggacccagtgggaggtaactgaatcataggcagttaccctcatgctgttctcatgatagtgagttctcatgagatatgatggttttataaggggcttttccctgccttcagtctgcatctgtccttgctgccaccatgtgaagaagggcgtgtttgctttcccttctgccatgattgtaagtttcctgaggcctactcagccacgccgaactgtgagtcaattagatctctttcctttatatattacccagtctcgggtatgtcattagcagcatgagaacagactaatatatacacttttttgttagccacagttatcattactttctgcccctagattctctccttgttgatactggcttctgaaattatttgcctttttgccctatgaaagaatgaaaacatatttcagaattctatggatcagctgaggaaaatgtgggtaggaagcaggtagaggtttaggctgcacagaacagctacctagaaaagtggcacatgaagtagtcttgctgtgaaaagtcaggcttggtttatcatgttgaaatgttgccaatgattaacattgtaaagacacaggaggaaggaaagtaaaaaaaagtattcaggaaacactgatcaatccagtatggtagagatgaagcacgaggccagttctgtttcataattgtccacctttttcatataccagtattgcaaacacataaatccaatctattcccaaagtctttaccttaggtgatatccaagaccccaccttcttttcaaaaacatagaagaacctgcacacttcagtctcccattggacatgatcacttttctatctgaatgaaagaaatcaagggagaaaagatattgggggtcatttcttctttctctagtaaagaaagacgaggagccaaggctcagaagtgcaaaggagaagtattcaacagggtataactagatctagtgtgcattttaacatttgaaatacatattaaaattgatgcatttaaaatgaactcatgatattattcagccataaaagagaatgaaaccatgtcttttgcagcaacatggatggaactggagtctattatcataagtgaaacaacacagaaacagaaagtcaaatactgcatgttctcatttatcagtgagagctaaaaaatgggtacacatggacatacagtgtggagtaatagacactgaagactcggaagggtgagagagtcagagggggatggggaatgagaaattatttaatgggtacaatgtatattatttggtgatgaatacaccagaagcctggacttcaccactacataatatatccatgtaacaaaacggtacttgtactcattaaatttatacaaataaattaaatttaaaataaaataagctcatgaacaccagtctatctgcaccttccaatactttctgaaaaaaaaaacacataaattacatggtatactgtatactctgatgctaaagaataagtgtctatttttcaattaaatatatataaaaaaagatttgaatgtttaaattaattgacagctgatctaaaaaaaaaaggtaatcagaatttttcattagttgtcactacctagcaaatgtacaaccagaaaggaattccacagtggaactagactcctgtcgtcctcctgactgctatagaatgtaggaacatcaccataatgagagcagggctcttaccctgggaatagacctcgcttctaaattccccaattgcatcatggtaacactgagataaaaccaacaattaccagccaggatgtcagcctcatccatggactgggtactgaaaaggatcacatgatctgctctacgctctctcaggaggctccacacttgatctctggaaaagggatccaatccagtagttggttcatctaaaagcaaaatctacagagaatgaagatatataaaatatgtctctctttcacattaactgtatccagaagatagcatgaaaaacaataaataccataaaataataaccatccagccatttttctccaatatacttctatttatagttaaacatagcaggttctctcttgatgcattacaatgaaagctctaccacttttagtggtaaaagaacttgacattttgcagacattcgacctgcttccttccccatgcataatctcacttacttgaggatctcctaaaatggtaatcccaaaagtcagctttcttttctgtccttcacttaaatgtttagcaaggttatcttgaatgttttgcatgtccaattccaataatattcgttgtacctatatgagaaaatacgcaacttttaaaatccaaaatgaagaagacatttatgcagccaaaagacacatgaaaaaatgctcatcatcactggccatcagagaaatgcaaatcaaaaccacaatgagatatcacctcacaccagttagtatggcgatcattaaaaagtcaggaaacaacaggtgctggagaggatgtggagaaataggaacatttttacactgttggtgggactgtaaactagttcaaccattgtgcaagtcagtgtggcaactcctcagggatctagaactagaaataccatttgacccagccatcccattactgggtatatacccaaaggattataaatcatgctgctataaagacacatgcacacgtatgtttattgtggcactattcacaatagcaacacttgaaaacaacccaaatgtccaacaatgatagactggattaagaaaatgtggcacatatataccatggaatactatgcagcccataaaaaatgatgagttcatgtcctttgtagggacatggatgaagctggaaaccatcattctcagcaaactatcgcaaggacaaaaaaccaaacaccgcatgttctcactcataggtgggaattgaacaatgagaacacatggacacaggaaggggaacatcacacatgggggcctgttgtggggtggggggaggggagagggatagcattaggagatatacctaatgttaaatgacgagttactgggtgcagcacaccaacatggcacatgtatacatatgtaactaacctgcacgttgtgcacatgtaccctaacttaaagtataataaaaaataaaaataaaatccaaaatgattcatattatgcaattttaaccactcattaaagcagtcgatatttgttatgggacctctttgcctaaattttattcataacagggcaaataaatcattgaagagaattctgtggtcatgatttaatttggtaagtggttggcaggtcagttaatccaagcatgccctcctacctcttgttccacttcctttagatgaatcccttttattttagcaaacaggctgaggttttccttcacggtgagtatgtcaaattgaacattgaattgaggacagacgccagttatctttctgatttcctccaagtcttgcatttcagagagatttttattatagatggtaactgatcctaagaatagaagttaaaaataaaattggcaagataatacattctattaatattcatagatctcatttaagaaaatattggcatatgttcacaaatgtctaaaatgatttgtgaactactattcttgacataaatatatgcttatagaactgcatatatgtgaacacaatttgtgaactactaattattcttgttacaaacatatgcttatagaactgcacatctaccctgaaatatcacacaatggaataaagataataatttttataaaattgcagaaatatgaagtatattcaaaattatgtagctcttggaaacaactttagataaacattatttctcttaagccatcaaatttaaaatttaaaatgagaggcatatgcttgacctcattctattataagacatcttgcctttgagaaatttctttttactcaccttctgttggaacagacaatccattaagaatatttagcagtgaagatttgccagctccactgtgacccaggattgccgtgatttgaccttcatatatgtcaaagagcaagcctatttttagaacaaattgttaacaaattattaacagtataaacagaaaggcattagacaggcctggtcccaacatagaacaaggctatttagtttagtggcatatttctcagcatttcaatactttaaaatacacaatgatcaatattttcctaattgccaaaataatatgtgacagaactataataattaaaataatatgttactggtgcaggatatagtgaccaatggaacagaacagaagtctaatatggaccaaagaaaatataaaaataaagattaataaaatgacctttcaaatgtattagaaagatggtttatttaataaataatattgggacaactaaacaaatacattaacaaattttatgtttgtaattttttttttttgttacaggatctcattctgccacctagactggagtgcagtggagcaatcacagctcactgcagcctcaatctcccacgcttaagcaattctcccacgtcagctccctgtagctgagactattggcccacgccaccacacttggctaatttttgtatttttagtagagacagggttttgccatgttgcccaggctggtttcaaactcctgagtttaagcaatacacccacttcgggatttacagatgtgagccaccatgcctggcctgtaatttttaaatgcaaagtatacggtgttttccagggtaagagggaagtgatactggctgttgggactgacccacagtaactggaaaaattaaatagaagcctcagtttcgtcatctgcaaagtgagagatatattaacatgtctttcacaggcctaaatgtaaaatggtacatgtaaatcacttagcatagtttcccgcacacaccaaatcctcaatgaaatctaagtgtttattgctattgttgtcgttgtcattattattcattatgtattgcttgtgggagtatgactttttatgattttagagggaaataatttgaaatatgaatcaagaatcttgaaagtatgcttcctttgaataattctgcttctagaaatttatattcaagaaacaatttatgacatttacaaagattgaacaaggctgttcattctagtattttttattacactaaaaattggaaacaaattgaatctcatacattggtgtgttaataagttagtcgtggtatccatataatggaatggtacttagcttctgaaaagtaggccatagataaaagatttcaaaagtgtgtcccaaaggtgttgcagatgtgctccagaaactaactccatgaggaaggaagaggaggctaagggattgcaacttcttccctgatttcccaaagagcagctatacttggtttgaattcataatcatatttttaatgtgttgatgtccaatgcttttaattttttaaggtgctgctatttttaaaatgaacaaaattcttaaagaagttttttgtttagacaaaaagaagttcatgacttgatgagtacaaaggtagttcaaaatgtgctccaaaactttaagtaatcaatttaaaattatttcagtatctcctgagctaacattaaagaaagaaatcacagctctagatggtatttgatgagagaaacctagagagagaataaaattgctcatacaaatacattaaattctcaaagacctaatctaaaagcaatgaataagactgaattagaggatgctgtatttattagaaaatacacgcaatataaacacaatggtcggagaactctacacttctggaaggttcatggctcttctttttcagcttttaaggcttctgtcttttataaaaatcatttttatccctcctaaaaattatttttaataaaagtaaatagtcctccatgaaatctagctactcactttgatgtttgcttaaatgtctgttatagaaaactgtatgttagaatattttgtatcaaaatgtgttttttcatttcaaattataacttaggtttgttataggatattgacttgtgaaatttaattcatagtcaatggttttactcatcttgctttagttaacctcaccagtacatataaactatgtaaattcaccggctagtataaaacctttatcagatttcagtctagatgttctttcctcacagtgacaatatataaaatattgttcatagcagattaatctttaaaaacaaagagaaattacatctttcattgtatgataccactgttataaattaatagattcatgaaatatctggaagaattttacagcatattcttaatcatgattaatgtccaagtgatagcgttatttatattcttttttcttttgcttatctacatatttcaaattttttcacattgaatgtttcccttttttataataaagaaagaagtgaaagaatgaaatttttcaatgtttttctttacctttcaatgcttccacttttccagattttcctttatattccttcttaacatttctgattctgaaataacaaaaagggtgcttacttagccaacacagaagtgaaaatagcacgggccatttatagccctagtcatagtgataactgcagccaaccactttatgtgaaataagggatggcataaacagtctattcagaaagaaaaaaccctatttttgattacttatttcccctgaggtagaaaatagaggagtctctctcaagttacaattaaactactagtattttgcctagaaaagtagaatgctgtgtaattatcctcactttcttcctctagctttagaacagttggttcttccccctgttcaagatcagctcatttacctagggtcttgaactggcatcctgcatcgtctccaagtcttgcttattagtttatgagtcagacactctgtcacctgcatcttttatagtgttctctctaatagttcctctttgaactcacctctactttggacacaatttaatttctctcctccctgtattgtacaaaattctcaaaataaacttgccattgtaaacttgccattttcacttcctgacctttaattcctcttcaattgcactctgatttctgaactcaccactccagtgaaccacttcataatgaaatcattagtgacctcctaattataaaatacaacaaatacttttccattcttacagtggattatgagtcactgttgatgactttctctttgttaatggtgacttaattgctttgcttcttatttttctaaatgttccttctctgtttcctaataaagtcctcttccttcatcagacacatcagcttgatattccacagggttctccatgtatatgatggatcttctcatttgagactctctccagaagttttctcgttggattttttgttttagcatcaacctaatgctgaccccacccttttcattgatctttagattcacacatctaatggtttgctgcatagatagtctctctctctgtctctctcacacacacacacacacagacacacagctcttaatcagtggttgttaattgtgaatacacattagaattccaaagggaactgatgcctgcaaacaacatctgagattcatattatattcacattaattacttctctgcagagttcacagaaaaaagattcacattaattgatctggggtgatgagtttttcttggcagtgaaggctgaggattgggatattttaaatgttcttccaaatgagtctaatgtgaagccaggtttgagaattaactgctctaaaactgcatatgcagaacagacttcactgcattgtcacctaaacccatttccccatcacgcaggatcttatttggcagcatggacattcaactactctcttcctgattctcactcagattcatcacccatccaacctggtatcatttttgtaaaatttaactctaaaatagttcaagtcttgggtcccttttaagtcttcaactattcttctcttgttcactgcctctagttcctttccctactttcagtttattcccctagaatccatgcttcacacaggaaacagggtgatttattttaaaatccattttatttactcctcaacgttcctcatcagcctcagagggaaagtcaaggctactttgtaccacatgaagcagccactcatggtctgtccagtgacatcttttggcatcctcggcctcatgttttatgtgtcaggatcaccaaaccaccatttatatcctgcacaaagcttagtgctttttgtcttttctgctgggtgtgtcatacacatatacatatatacatgcactcacacacacatatgtacatatgcacaaacacacctttttatctgtcttattcttagaatgttcattgcaacatcatttgtcagaccaaaaaattagaaacaactagaatatttttcaatgtcagaaaagataaataaaagtggtagattcatatcttagaatacttttatataaaaattaaaatcaatgcattagcccatagttatcactatgaatacaccccaaaaagcaaaatgctgagtgtagaagcaatatgtagaaacttaagtacagtctgataccatttatagattatatcaaaaacacacagagctatatcacatatatctatatcacatattgattagggctataagtgtatggtgcaatatgtaaatatatgaatggaaagtgataacaccaaatccattataaaggtaaattctgacgaaggatggagaaaatattttaaagagatcaaaagggactttaaataaacatataatatatccattaaaaatacaaagcaaatatgacaataatgtttatatctgctcaacccggatggtgaatatgtcagctttaaaagcctaaatttcttcagtaatttttaactttttaaaacaaaaatagacgttctcttcgatttccctaaactagggtagttaacacttctattgactaaataacagtagttaatatctctatccctacatttatcagattgaatttcatgtacctatttattttgttccctgtgttgtgtgctccttgaaagacagtttattgttcatatttgctgccctaaagattagtaaagaacccagcaacaatatgtttgttgaatgaatgaatgaagcaaagttaaaagatgatgagtctcaccaggtattttatttcagcatttctttgtaaaatggaatccctgttgaagtgaaactttaatgttttgttttaataaagaaaattccatttaggaggagctgttgtttctggattttagacatgaaatcagtcatttacatttgaggcagacattctacctgtgttctgggaatattgcctgaatggtctatagttacaggaatgcacatatgtgtacacaattgcccccagagaaaatgtgacttgggagttatgaatgaggaagagccagttgtgaataaaaaatgtatatttttacaaacccagaatcatgattctggttagaattctacaaactttcatccatacccctgatacatagagcttaaagattacataccctgtaagctctatgtatcttaggggaagagttcctttgtatataaagcatttctatataaagaggaagagtcaatttttatataaagcagagaccacataggaagaaaaaaatcaatggcttagtgccttttatattcatacaaaatagaattcacacgttggaattgattgaaaaagatttgacattgtctacaggtggggaagagtaatgatgccactaagaaatgatcactgtgaagaaagaagagataaaacttgtggattagaaactgcatatactgttggatggtcaaaaggcagttttagactgccttgcagccccagacctgctttaacactcagtgagtgtgtaccaccttgccattaaagagctacaacattgaccgcctaagcctactttcttgctttggtgtggatctggggtgaggtgccccacaatggagccaaaagctttagtgaatagtccttgcatcaaatgactttctttccctggtttgtcagtagcctcaggtctccacctgagctaagaatccagaccaagtgacaggtgtacccagtcaacactgtatacattggctaggtttggaggcacagtggggatgtgggagaagaagggagaagttgggggaaggtgggggtggagcacattttactttctttcctaggtcactaggcagcagtagaagaacaaagaaaattttgaggtctttgtaagtaaaagattttgttagaagattggatctgaaaatttttataatttgaataataatataatacaatattattttgtgccctcaactggtaaagaaggattgatgacactggaactgagttttatggaattattcctcacttggcctttcttgtttggatagaaattttctatggagctggtatactcctagctagagcagaggaagcgctgttgcccctctcagaaaacttaaacggaaaattggttaagaactagatggaggaagcttaggtatatgggttaggcctctttgtcttggaaatatttcacttcctagatatggttctctatttattcatttttctttgcctcctgacatctcaatagtatgttaagagcatagactgtagagccagactatctggattacaattccagttccccacttgcgagttgtgtgatattgggtaaaaggcttaagctttcattgcttcactttttgtattctcaaaatggggaaaataaagatacctacctcgtaagctttttgtgcgaattatgtgcaagtcaggtacatagtcagcactaagtaaacatctgttaataaataaacgattgctatttaaagcgctgatccattaactttgtaccaaactttgtagaaaaatctacaaagctattttgaaatccatgatacttgggttcaatcccaaaactgctgagttagaatccctggctaaaaacagatattctaaatgctcctcatgcaattctgtgatataccaagtctcataacaaccctacaaagtcaatattaatcttgtttcatagaagacactgagactcataaaatttactcatttttccaagagtacacatcaaatgagagaggagagtattaggatctaagaatttctgattcagaatttcttacttcttccaacttatcatataaaaccagatgaaaccatggagagaggggttcacagaatgaaaggagcaagtataaaagagaggtgggcacaagagaaagaggcagaaagggggacaagatgaagtgtggctggataatatgatacagagctgataaacaaggaggattttcctttcaagtaacagaagaaattggtggtgatggaaatggagcagttcaaagtgacattgacaaaaacaaatatcttctccttcaatattttgcctcaagctcaccctgatgctctcggttaataattctttagccttatgttctcactcataggtgggaattgaacaatgagaacacatggacacaggaaggggaacatcacacaccagggactgttctggggtagggggaggggggagggatagcattaggagatacacctaatgctaaatgacgagttaatgggtgcagcacaccaacatggcacatgtatacatatgtaacaaacatgcacgttgtgcacatgtaccctaaaacttaaagtataataataataaaattaaaaataataataattcttcagccttgtgctcatgcattagtattacttataagtgtgattacctgatggcttcttttccttggaattcaggagctactggttcaaaataatcatcagagggatgctcagcatcgatttctttctcaataaccttagcattagtcctttggtgttggaaacaagatgatgaattcaagaaaaataaaggagaataatggcgctcatctccatctaattaaccaagaggcaacaaaatatgatcagtaatagtaaaagaatgcgcaaagaagccttgctaacaacaatgcagaatgccttgaagttttaagcatcatagagacattttttcttctaaaactcaatttattattaagaagaaaacttgatgatgaagtaaacaatgggaattcaaaggaaataacatattgcaaaattaaacaatataatacagctttcaacaaagtataaatagaatgtgatcaaaaaaaagaaagtcaataggaaagtgaggttcgaataaaatattaggtgtatgaccagctgagttggactccagcttttccctgatcaagacattagtacagatcttagagcctctgttgtctacatctgtagaaaaggacacccaacaaggaaaccattatatgtcctttttttccagtcttaacaatgggttgcattatccttaataggctcatgaaaaacagatttgtatcacccaataaacatatttattaaatttttttaaaatgtgatctaaaaggtatttaggagaatgaatgaaaccaaatatttgggaagacacaaagccttaatacagtgcataaaaataattgtagacatgtttgtcaacttaaataatttgaccacagcaacataattgaacataatattgaaatctatatattcctgcttaggcatgaatacatggagaaactgtatttgtttagaataaatttatagtgatattttaaatatatttttccagtttaaaaaacaaagttgaatttattattaagggccttcacatatcaaccagaagtcacagaaagacaggaatatatacaagtaaatacatagaaaacctataagacaaccttaaatagtggaaggaacatataaaataagaggataaacaagaagattgtgccagaaaaaaagctttctgattctagaatgtgtgaaaaaattctgggcttacgtgacatttttggttgtttgcaagataatttaactgggcgatcaatatacttctgtaaatatgaacaatatataaaacattttgagaatgatgctgaacaaatattcatgagaaagctcttccacagtataatggcctcccgagagccaaaccaccataagaactaatttcttttatcttgttttgacataaatcctaatatgaccctttcaaaacactttcagggatccatgaaaacctaacattatttaattaccacacaattacaagatgtattataattattgttgtcatataattataatatattgctatagtaaagtcataagaagaattgtttttacataaaaatttcattagaccattagaactatgaagtagaaataatgaacttattagtttgaaatgggaaatatttaatattcattttaaaagtctatataatcttaaaaaatatattcaatgtaattaataactgtagaggacagagaaaaactcactattacttacagggtaaaattttgtcaaagtataatgccaatagcaagtagatgagaccatccaaaagcaacatagaaaaagttgctatcattgtatatgagtctcctgaagggtcaggaaaaattacaccattcaagttataatccagtttgataatctaagattcaaaaaataaaaataaatgtttaaaataaataaataaatagcttggcatagcaggaaaaagtattaatttattaactagctttttcaagaggcacttagtagttactagtcaaatatataaataagtaaataaaggtattggtcaaaatatttctattttacaatgaaaaataattagaaagaaatatttatttaataaatacaatgttctaagtataataatttaaattataattcatttgtttgttttcagaaaatcattgcagtattacaaatatctattctgggcaacaaaggagatataaattttggaaagaatataagaaattcttggacgcctttaattagataaaaagagaacttacctccttttctagttattatttcaaataaaagtttgtatttagaattttgccacataataacagcgactatgttctaggcactgtcctaagtgttttgtatattatcccatttaatcttccttaaaaccctatcagataagcaataaggcttataaaaataataagattttaatctgcactttacatatgataaaactaaggcacagcgaagttgagtagccaaaagtggcgaagtgaaattagaacaaagaaagtcttactcttagggccagttccttaccctgcacactctacagcttctcagtctatgttaaaatgttaacattttcatgataaagttgaatttattctaggaatccaaaattgagtcaacatttgaaaatcaatcaatgtaattcaacatcaaacattaaataggaaaataatgtgatcaatataatagacacagaaaaaccatttggtaaaatgtaatatctattcatagtaaagaaaatatcttcataaactaagatgaatcttccttaatctggtgaattacatgcactgagaccaacaataagcatcatacttaatggcacaatgtagaaagcttttattttgcctgcatttctattcattattgtactagaggtccggacctgtgcaggaaagtaggaaaaagaaataaaaagcataaggattgcgatgggaaaaatataagccatcattatttgaagacaacatgattatatatgtataaaacccagaaaaatattgggtttagtaagagaatatagcaagaatgctggatagaacgccaatgtacagaaatcagttgcatctctctacattaacaacaaatgtttaaaaataagaatttaaacatagatgctatttataacagcatgaaaaatatcaaaagcatcagaatgaatcaaataaaaatgtgtaagacctctacagtgaaaactaaaacaggccaagtgcatggatcacacctgtaatcccagcactttgataggctgagttgggaggatcgcttttttgagcccaggaggttgagattagcttgagtgacatggtgagaccaactctctacaacaattaaaaattagccaggtgtggtggtgtatgtctatagtcctagttacttgcgaggccgaggcgggaagatcacttaagcccaggaggttgaggctgcagtgagctgtgtttgtatactccagcctgtgtgacagggcaagaccctgtctcaaaataaaataaaaataaaaaaagataattattaaagaaaatcaaagatcactgaaatgaatgcaaagatatattatgttcatggctgaaaaaaagatgactattttcttcgaactgatcgaataattcaactgcatcacactcttaatggctttgcacaggcacataagtgtgtgattatgtaacttgataagctaattctaaaatttacataattgcaaagaaattagaatagacaagactctattgaaaaagagattaaagaggtaaaactgttactgccagatatcaagacatatgataaagcaaaacaattaagacaatgaggccacagtgcaaggataggcattttggccaatacatgattggctgagttacgataaaagaaagattgcaattcattcaaggaaaggatagtctagttgataaattgagctggagaaattggatatttgtgtagcaaaattaatattgcctctacctatacacacacaaaagttacactgaagtggatttttatcttaatgtaaaagctgaaccagtcaatattctagaaaaacagccagaaaatatctttgtaaacttggtgtaggcaatgattccttacattgatttttacaaaaagcattctacataaaagagaaacttgaaaaattggaccttatcaaaattatgtatctctgttcatcacagttaccattaagagaggaaaaaagccagcaacaaataatggaaaaatgtcggatgttcaacatgtataaggaattatcataaagcaattgggagaagatagaaaactcagaggaaaaatgggccaaagaactggataggtaatttataaaaaagaaaattcgtaatccactaagcatatacaaaggcattaaacgtcatcaataatcggggaaatgcaaattaacactacaatgatatatcattgcataaccatcagaataactaaaatttgaaagattgacaatactaaatcctggtgaagtgttagaaaaactggaattctgaaacactgttgatgtaaaactaaattgatgcaaccactttgggaaaatatttggtggtagctactaagattaatatttgtatactctcagccccactattctgtttgttatattaacgtaatgaacagaatgaaatgtccatattcagtaggaaatgtgtactagaatgtttgtagcagctttattaaaaatgctcaaaaactaaaaattatcataatctattgataagaaaattgatagtatgttaacacaataggatgctacataactctacactatagctacacagaaactatgctgccacctaaaaacgtcatgttgaatgaaaaaagagattttcaaaaatacactttgtgcaacatcactcctatgaagtttaaaacatgcaaaaccaaaaattttctttaggaacacatacttaagtggtaatgaaaagcaaataagtgaatatcataaaatttttacctttacgaaggaggagtgttctgaggggtttgtgactggtggcaacatcctattccttgatctagttcatagatactttaatttactttataattatctgttaaactatacttgtgtttggaaagtttttcatattcatagtttatacaataaaagtgggttcatatataacaattttaataaactagcagatattttcattatgttaaatgaatagtaataaaagtaaatatttgtatataggaaaaaaacctagaagaaaatacttcaaaatgaaaatatatctgagcggtaaaatctgaaggatttttttaaatttaagtttctttgtgaggtgacttttttttttacaatgtaataataacattttaaagcttaactttagaaaaattgtttagaataaaagctcttagtttgagtagtgctgatcctacagcgtatgaagtatctacttcttttgaaatttcagtaataaaccaattaactaggctcttacctgaatcattccagtagtaaaggcaaaagggctacaaatattcaaaatccactccagagatgaaggaagttgttcataaaatacagtgaatcccagacatccccaaaagagggtaaggagaaacacaaccaaattggtgaggacagctttctttaacagcacactcatcaggaacaccaaagctacctgcaagagagagaagacattcagctgttataaaaaatatttagctcactgagaatcattggcagcccaatcaaataaggatttttatatcataacataaatatttatcagtgagaaagtggtgaaaatattaaggtataatgagtctgttctttcctcaacttctcttgaaaaaggatccttgtttgtcctactcaaatgccaggcttttgttgctaggaaagggtgggggaaaagctggaatgagagctgaggatagggtagaaatgcagacttgggtctaaattaatgtaatgaagctaaattaatgtaagaaggagcatctacatactttctgcagaaaacaacctggaagatggaaattagaggttcttgttcagagaaggcagagcggagtgaaacgagaagtaagtatgagacagaatattagagggagaagagatattgtgatcagctaccatgtgatgagcacccttaagggaaaaaaaattgggtccacccctcaaaaataacctcaataattatacagaaaagactttgatattttagagtcagcattgttttttctttttgatacatcatttcattagttcagacctttatgcaaaaggcaagtcaaattttatttggattacataactttttcactccatagaaactatttcaagtacacacaaggacacacacatgcacacacacaatggacatgaaagtagtgattgcagtaacctactagggcattaatattagctacatatagctaagatctaaagcagagaaagtggtaataaatgtatcaacttaccaaagataagccatataaaaaaaagagtataaatatgaccatgaagccagtcatgactataatttgggtgaatgttatgataattgtaacgaatatggaaataataaagatgaagccagcatagattagaccccaggagagcctaaataaagacaaaaagttatataaattatgttaacttatttacaaaatatttaatatatacaaaagcatctaaagaacaatgtaatgactacccttgtaccttctagattaataactatactgttaatcctacagcagaagctcattgcatatcctttttcaatcgcaattctccttctttataattgccattcatcttcgttacctttaccatatatgcatacagagatgatagatgctgaacactggtataggcaccaaccaatagaaaggatgccaaggccaggcacggtggctcatgcctgtaatttcagcactttgggaggctgaggtgggcagatcatttgaggtcaagagttccagaccagcccgaccaacatggtgaaacccgtctctactaaaaatgcaaaaaaattagccaggcatggtggtgcatgcctgtagtcccagctactcgggaggctgaggcagaaaaatcgcttgaacctagaaggcagaggtttcagtgagctgtgatcatgccactgcgctccagtctgggtgacagagcgagactccatctcaaaaaaaaaaaaaggatgccaaaattaattaagtgactgtaagcacagctgggccattgtgcctcgttggtacctacgtgttaggcaacagctctgtgtgcatgtattgtgtaaatagtatgactattgtattaaacagtatcaataatatcatatgtatgtattattctgcaagatgtctttatcaatcaacaatattatacactgctgtataatatttcattatgagaatatgacccaaaattctgctgcccatggaaatttaggttgttttccatttttttctattacaatgccaagaacattctcgtacttgtcttttttgagaaaaatgtacaagagtgtttctaagcattttgtaacttcagctttgttagatattgccataccgtcctaattgtagaattggaagcaacttaaaagcctctgatcaatcaagtaactctataaacactggggcagttgataatttgactatccatggggatctcagcaggcagcacctccagtctctttcgtagtagaaaattgaaatttcacaactctactaagcccattctattctctctaatcctattcatgatttcttcacttacatttgtataaagtatgctgcacccttaaatatttgcacgattttgctttagaggtgctagtgttgatatttttatgaagtggttattaagaaagagtattcaatcttagatctaacaagactatagagtgttttagcccacgtgtctcattttacaaataaggaaactgcaatccctattatttgttaaggggtttatccacggtcacagaataaatcggtaacaaagttcatgaagttgcaggccttatctctgtccagagataagttcatctacttaacactgactaattaaatgagaattcaatagctgaagcatatagcacaagtattaaaaccaggactttgcatcaatatgtcccagtagaacatgttcacaccagatttactggttatttgacttctttttaaatttcatgccattacaataattaagcctgtgttagaaacatcagcacttttaaaaaacatatcacattctgtagaacctacttcctgaattcagaagggaactactttaggtaggaattgaaaaaacacaggatatgaaaattacaaatgaaagaaattacctagaaattgccactacttagaaaaaggaaccacttgcaggggtggagtggaaagtcagatgttaataagtgtataaaaactatcttgctaaaaaacaaagcaattcagacactatacttaaagaataaatactgattaaatttcacatttattacattggtaaaaaaattgtcataaagtttatttccactagatagcctgcacttagtagaaacatttcagaatcttttttcttcttagttttaaggacgtatatatgaatttattttgctaagtttttaggtcacatacatactaagaatcacttatcctgagaatgaattcacacccaaatgttccatacctttctgactttaatatagagttgactcatgcctccctggtctcaggtgactgcagggacactgtcccataggacatgccctggacagaaagaaggccccttttacaggggttccctcctaacagactccatgggaggctctaagtccattcttttgtatttcccaaagttccactgcaaaaacttcttctctcttttttatttgaagacacaggttcctctttttctatcttacaatttatgtatattagaattaagattctctccattaataaaatatattttatagaaaattaaaaatttactgtaccatagttttatttcaggtaacacgtggctcccaaggaattgttcaatacataatttctcatccattccaggtagttccaaaaccataaagagtatttgcttgatatggggcatagatagaaaaacatctcccaggatttaatataacaaatgttatatttcttttggggtattatttttccttttttactttttctagacagacagtatggattttgtcattgatagtattgcaaaagccttttggaagcttggagcttgtatgatttgcattcctatctgctaatcttacttactgattatttgctaggtgttttgtttttgtttttgtttgtttggttttgtttgtatgtttgtttgtttttatggagtctcactctgtcgcccaggctggagtgcagtagcacgatctcagttcgctgcagcctctgcctcccaggttccagcaattctcctgcttcagctcccaggtagctgggattacaggcacgcgccaccacacctggctaatttttgtatttgtagtagagatggggtttcaccatgttggtcatgctggtctcgaactcccgacctcaggtgatccacccgcctgggccttccaaagtgctaagattacaggtgtgagccagtgtgcctggcctatttgctaggtctttatttctactcctaattatttgtctttattatgacacaaatacatatctatctacctacatacatatatacatacatgagtgtgtgtgtacatatatgtgtgtatgtatgtgtacacatgctcatgtatgcatacatatgtaatgtatgtaaatatgtatacatagcacatatgtatgtgtacacgcactcatgatttcaaaatcactttaaattgaatgtggagtggggggcaagatataaatatcaatatatatagcaaatgcccttgctaaggtcttcttacatgccagcctttgtgttgtatgtcctaggaatattatgtgggctctctcattttattccaacatatagtatttacttgctccaaaaaatctatgccttgtggccaaacccctgaacacaagtcaacttttacaggattatactctcttcaacatgagaaagtctggagaaatcaactgttaactgtaagaagaccaggcgagaaaacaagctgcagtcagggcacctgggttagagtctcagctccggcactcaccctccatctcacattgggcaattctcttattctctttgaacttcattttccttgcttataaaatgaatgacagtccccctgtatcagtgttggcttaagacattcacggcacagaaaaagtgctcagcacattataagcactattttgcatggcaaaatttaacagactaagtaaaaaactcagaacaaaagaaaaagtagccaatgcatcaagtttaaaccatgatgctctgaaacaataacactttttcactgcttcttaattttcctgtttattaatttgcactacttgaattagtcactcaccagaatgctgaatcttggagacccatcattttcatcaaattcttagacttttttctctcttttgttacattgagtgatataaaatatacaagtggggagaaatgaagcaagaagaataaaataaacatctcattgtgaagaagatttttagttatgaaaggtaatgtcttcatagttatagcagtaactgacatcaactcctccatcacagggtgattggttgtgatctaaagtagagtttaaacaaacataattattatttaaaagatagaaactggtgaactatgagtaagctctgtgtattttacttatgtcggttctccaatttttcttactgtactgtagttatgcaagatgttcccagtaaaggcaactggatgaagggtacatggacttctctgtacattacatttgcagcctcctgtgtctttacaaccacttcaaaattagttttacaaccaataaaattggttttaaagttttaaaatagatatgcaatgtgttccttggtctgaatatctgcttcattatataaccacaggaaaatctgattatatatcattgctacggtttgaaagtggcccctcctaaattcttgttgcaacttaattcccattgtgatggtattaggagggagagcctttggggtagtggttgggtcatgagggtggagccctcatgaatggattagtgccttgtaaaaggctagagggaactagctgaggcagtttttgctctccattctttcatcacgtgaggacacttagacggtgctatctatgaggaatggacctttaccagtctttgagcctgccaacaccttgatcttgcacttctcagcctccagaaataaatttctgtcctttacaaattacccaatctcaagtattttgttgtagcagtacaaacggactaagacaattatctttcatcaaaaatcttgaggtctctggaagtagctgacattaattagtagaacttttcaatcaagcacttacttctataatggcagtattaatagctgtttgtaaagccacaaatcctctattccagtatttggtcaatgtacatgaaaactcaccatatccatcccagcaatgagctgtaagcacaaagaaaagcacagccaacattatgggacgagggcagttggagaatatgaaacaagtattgaaaagaaaacaatctagaggagactctaccagtaaacttttttggtggtggtgtttcgtttttgttgtggttgtctttttttttttggagatgaagtctcactctgttgcccaggctggagtgcagtggtgcgatctcagctcactgcaacctccacctcctgggttcaagtgattctcctacctcagcctcccaaagctgggattataggcacaggccacgttgtctagctaatttttgtatttttagtagagacaggctttcaccatgttggccaggctggtctcgaactcctgacctcaggtgatccgtgcacctcggcctctcaaagtgctgggattacaggtgtgagccaccatggctggcccaccagtagacttttaactacatagaaaaaggaagcaaataaatgaaagtttttaataaagcaattttattcttgcagaccacagcatgcttagaaagtcttagaaaataaaaaggagatgaaagcaaacactctgctccagccataatggactccttgtttcttgacattctccatagcctcttggcaatctattccccgggctatatctggagtgttcccctaattttggaaaccgaattacacttttgccgtgattaaagtgactcagtggctattccttgcctaggtttacaagatgccacaggaggtagcacttgagtgacttcagcttcactctcccattacattccttttcatgttccttgttcagctatactgctcttcttccagatctaggaacagatgtcctttctcacctcagggtcttcacaattacctttcttctatctgaaacacaatgcttctagcacctcacacctgctattcattctggtctccctttaaacatcatttccccaggtaggacttctctaatcccactattaggaacccctggtctaagtgcccatgaaacactttttcttgtacttgtcattaattgttcaatgtctgtctttgctgctaacctggaatctcacctgaggctggggcctgtcagtcttggttactcatgtgtcctttgacacatgcatctgcatgctcaacacatatatgttggatgactctacaatttttgcagtcatcctgtagtaggaacatacgattgaccttgaaataagttcagcaatgaaatgggctttccctgttttctcatgtgtcattgaaagcatctctgttgcccaacctcctctgttctttatgttgaaaacatgaaaaattccataatgatatttgatatggaaagtcacctgagaaatcttctttccaaagtggactgttatatccctggaaaaatattaacttataagagaaagtttcattaaagatgattcccatagcatatggtaaattttccagaagtatttcgtccatgtgtgttttatttggtgccccaatgacacttgttcctgtgaattacaaggtaaaaatagacatagaaaattgtaagagttttgccacaacataatgtgatattcaactgtttccccatataatttcattagacttaaattaaaatcattttccatttaaatcaattttaacccaaatgcaaggggggaaatttaatggtttagattctacagtcagaagacatgcataagaattacatgttttattttcataatgacaagtatcagggcaagttttaggtacataaagaaaaaattgtgccaaattaagtatgcataagagaatgagagtacaaaaacagaattaattgttgtagttactatacagtcagggattccttatttcagatttactgaagcaaagacaatttatatgacctttgccttctgcagaaaacaagattttttaaaagtgactctattttcaatagccaggaatttcacttgtcaggaatggaggattaaagagtaaatagccaaattgcacccaatttgcccatgaatgaaatatgcattttgcttattttggttacatcataatgatctcatttagaataaagacttttaaagatgtttactgattgtactatattcagaacagaataatcatcagattattcatttctgcttttcaaagttatgaaattattgttcaataaccatgacctattttatttatttagatgtttttttcctgagatacaaatcttaatcattgtatgccatgttaaaaacacacacaattttcaattactatattccttctagatactatcctgcaaatctaaaagtataaatctgggtttagttatattccagtagaaatatggacctccctaaactggactcccaacaagctgaaaatatttcaaaggctagttgttgtgagagaaagcaataatctaaccagatttgtatgctattttagtacttaagttattagcataatatatgactttaacttcaaattaatgtgtagacaacttatcaacagtatatagacatctatcagtaactctttttttgccatgagtacacctacctttcaaaagaggagcaagtgctgttttattcattatctgctgggttaaattagatattggtgtatacacaaccattaaagaagagctattaaatttatctacccttcccagattctgaggagccattccaggaaactggacatttctcatggaactggaaaacagagcaatacacagtcctagaagtattgagaggccccattcctgtaatgcatataaaaagaaaaataatgaattaaggttgcattcacttaaagatctcagttaatacaaaatactgttgaaaacaaattccaattgtgctatacagttatgttctctctgctctccaagcctcagagcatggagaatcaaatgaaagataaatactgagacagtagccacatttatcattctctaatactagaacaaaacttttgcattaaatcatgaactcctgcagaagccgtcatagaaactaatggagtgaataacaggatgacaatctctatatgcatgggcagctgactatagaatttataagacatggagtatcctagatagagtttatggtggcaaatagcaatatttttgccagttgtcatatccttgtattgtaaactaaagaaaatgaaaaggaactggctggtggaggctactactattgctgttcaccaatgtcaatcatcattacctctttggcaccatgcttgactgcattctcagcctactgaaattaagtggaaccgaatgatttcctggaccacaggatatgggcagaagtgatatgcactacttccaggcctcgttcatggacatatacaactttctatattctcactgtcctggtcccactatttcctgatcttttgactgaatgcataggatcctctagaggtcttcaaggtccaagatggtggcagaggtcctggatgaagcctaggtgcctgaatgattgtgtggagaagatttcttcacccacccaacctactttacttccactctcaactttcattagaccatgaggagttaaaaataagcatttgcttgtatcctcttttatttcattgagcagtgctttgtagttctccttgaagaggtccttcacgtcccttgtaagttggattcctaagtattttattctctttgaagcaattgtgaatgggaattcactcatgatttggctcagaacattccatgctcatgggtaggaagaatcaatatcgtgaaaatggccatactgcccaaggtaatttatagattcaatgccatccccatcaagctaccaatgactttcttcacagaattggaaaaaactactttaaagttcatacggaaccaaaaaagagcccgcatcgccaagtcaatcctaagccaaaagaacaaagctggaggcatcacactacctgacttcaaactatactacaaggccacagtaaccaaaacagcatggtactggtaccaaaacagagatatagatcaatggaacagaacagagccctcagaaataacgccgcatatctacaactatctgatctttgacaaacctgagaaaaacaagcaatggggaaaggattccctatttaataaatggtgctgggaaaactggctagccatgtgtagaaagctgaaactggatcccttccttacaccttatacaaaaattaattcaagatggattaaagacttaaacgttagacctaaaaccataaaaaccctagaagaaaacctaggcattaccattcaggacataagcaggggcaaggacttcatgtctaaaacaccaaaagcaatggcaacaaaagctaaaattgacaaatgagatctaattaaactaaagagcttctgcacagcaaaagaaactaccatcagggtgaacaggcaacctacaaaacgggagaaaattttcccaacctactcatctgacaaagggccaatatccagaatctacaatgaactcaaacaaatttacaagaaaaaaacaaacagccccatcaaaaagtgggcaaaggatatgaaaagacacttctcaaaagaagacatttatgcagccaaaagacacatgaaaaaatgctcatcatcactggccatcagagaaatgcaaatcaaaaccacaatgagataccatctcacaccagttagaatggcaatcattaaaaagtcaagaaacaacaggcgctggagaggatgtggagaaataggaacacttttacactgttggtgggaatgtaaactagttcaaccattgtggaagtcagtgtggtgattcctcagggatctagaactagaaataccatttgacccagccatctcattactgggtatatacccaaaggactacaaatcatgctgctataaagacacatgcacatgtatgtttactgcggcactattcacaatagcaaacacttggaaccaacccaaatgtccgacaatgatagactggattaagaaaatgtgacacatatacaccatggaatactatgcagccataaaaaatgatgagttcatgtcctttgtagggacatggatgaaattggaaatcatcattctcagtaaactattgcaaggacaaaaaaccaaacaccgcatgttctcactcatagatggcaattgaacaatgagaacacatggacacaggaaggggaacatcacactctggggcctgttgtgggatggggggaggggggagggatagcattaggagatatacctaatgctaaatggcgagttaatgggtgcagcacaccagcatggcacatgtatatgtatgtaactaacctgcacattgtgcacatgtaccctaaaacttaaagtataataataataaaaaaataaaaaataaaaaaataaacatttgctgtgttaagccactgagatttgggctagtcatctgtgattagcccacctgcttgatgcaaactgactttcagtggtgttagttgatcataattcttaaaaacaatttttgtgtagaaaattcatgtccttgaaaataaatccacaaaattaaaatgtctccatttcttctgacaacattttttttgtacttcttggctctaagtgtataacatttggtagtagctctagcagttgctgtaatttaccatataattaaatgttcacttaatctctttttatatgaggaattcttttagtctttaataattttatgttattcttcagtctctcaattcaacaaatacaactagagagaactggtaaaatcaataaatcccatctactaattaaaagagaacataagagaatcagtaggtaatgaaacactgtaagagtgctaaccgtggaaagagacaaatttttaaacataccaataagctctctcttttcatcctccatttcttaagaaaattcttgcacagaagtgctttggtttgctgatacacgcttttctgtttcatattcatttagcctattcgctgaaggagaaagtaatcatggtggaacacaacctagaaaaaaataagtgtaataagaaaaaccttgatcatagtgttgaggaaaatatttactacctttaaaaagtgtaaacatgaatttaaaatattatttcaataatttatgactgtaaaatttcacctcaaatatttcaccttaagctttttaggggagtgggtgatggtgggaaggcagagtgattattatcacaattttgcaataacttggagtactgaaatggaaaagctgtaattcaacttcagaacctataatttcacatttttggccttgtatgagagaactttaagtacatgaatagagtgattaaattaatttcatcctgttaatagccatttcttgttctttacattgaaacagaaatctcagagctaatcaaattaacatcaaaagtctgattacttaaatttgtctgaataataaattacatccactagatacaacctcaataaagtgttttcttgtaattttaccttcagattgaatcaacttttatgaaaagagataggttgtaaatcataatccaggctcaaactacttgaaacttgattctgagatacaggaagaataaagcaatttctctcaattttctgaattcagaagtccctgaataactaatgaaactacaaaattagctttaaaagaagcaaaaataaatcacacgggaaagtaattttgcccaaagatttgcaaatcaagaaacacaatttttttcgtttctgtaacctcaaaatgaaattctttcatatttttacatcaaaatattcagataattctccctcagctagcacagaagcaaattttttccatttttctatgtcttactgttacaatctacacaataaaaagtggttgggaaaaagcagaaaaatttagtcttaggtctttaacataaaacacataagaattgggaaacatctgaaaaatagattgattttagcagtgtccacccacatatttggcacagcacaacaaaatagagctttacttactgtcaggaaaataataaaaagcactctagaaacactgtcaaaaccagttctctgtttgtctaggtaacgattacaacttctttattgctgcttcttcattttttctttaaatgggtgcctactccagcagctcttacacagcctggtttctgaaaaggggtgtagccagaccaagctgtacatgatgaacttgttttgttttctgtgtctctttctccctaagccaattattctgcaaggaaatgactgttccgtggttggttgggaataaaataaactctgtgtttgttcacttagcctttcaactacagggataagggggaaaacggtaaacaaggaaaatggaactagttcttcagaaatgatgagaccaagatggaggcaggaacaagaaagagtaaaaacaataactaaccaaacaaagcagttaaatttgtataagaaatctgtatctattttcttttcactactgatgaataaacacaactgccagttagttgtatatttaactaattcagactaagttagcagagtattctggagctgattttttttcctaataaagctaagcaatccatagtacgccttggagaaactcctaggacagacaaatgaagaatttttaacaaatttgttgctcccaccctcttcacagtggatacaggatttcataatacttatgaacaaaataagccagtggtttgcccaggtctacaaaacatataaaaagattcagataaatttttgtgcacgaagactacaacaaactgaaacatgtttaattcatatagcatagtctgtctctctctgctctgtaaagagttgcaaacttttcttgacctgccacagtgaatggcaaaacaggaaatcaaagtccatgaattgggaaatctcaaatatttgacacggctcccaatccacagatgttaataatcataaagctgagaaactttctggagcaaagcagataatttaaacaacaatgacaactacagccatgatactattatgtgtatatgtgtgtgcctgtgtgtatatatataaaatgtatatatatataatgtatacatatgtgtatatatataatgtgtgtgtgtgtgtgtgtgtgtgtatatatatatatataaaatttctctccttggcaattacttctgtttttaaaaatagtcaacagtgaaatgccactttttttacattgaaaattggcacaaacaccgttaataaaggtgttctaaagttctcatggggtgtgggaagggaggtcataaacacttaacattttgtaatagtaatataacaaaactcaaagttacttttaaaccacctggaatacagttaaggcttttatgaatttttttgttgttatcattgttttagaccctttatactttattttaggaatcattttcattctgccattcttataattgtattaaaattcacagctacaatatcaatgataattatttagattaaatatatttattagtttcatttcttaccattgtttcttgtgtatgctttcttttcctttttcttgacctgtttcctcttacttattttcattttgggaggctgttttccttacgtaatgtgacaatttccccacaaatggtgatctaatatactaaagtgcccagcctccagctagaagggcatggaagtggtgggtaaaatatatccccaaattgaatttccaatatatagtcaaattcaaaaaaggaagaaaaaagatgaagaatgtaaacaacaatggaagaaacaaaaaaagacagaaagacatgtttccaggtgttaaaactgaaaaggaatttaaagtttcccttaagttgtgagtggcatttcagacactccatcagttcaaggatatactggactgaaaaccaagcctcaggtgttttaatgaccctctggcctgaacttggtccttgaaaggttggtaagctggagttcatattcctgcaggaatccagagggtttataggactgtccggtgctaaaaacagactaggaaaatttcacctacaacctcaggggagagcaaagctgtattctctgcccaatttctggaagacagacagacagatagtagatagatagatagatagatagatagatagatagatagatagatagatagatcgcccatagaaaatgaaaccacaaagtatgtagagcatgtatcaggtacaagagacaggagaaggatctgaatttattctcccagtataataacctgtccagagatgtattacaggagttagtgtaaacactctggagccaaacttgtgtccaaattctggctctgccatgtactagctgtgtgaccttgcacaatccatttaactctcacgccctcaggttttttaccccccaaaagtggaaaaacaacagtattaatatatatataaggttattgtaggggttaaattcatctatgtaagtacatagaaaaatgagggaaaattgtaaaagctcaaaaaatgttatttgctgttacttcccctcctcctcctcctccttcctcctcttcctccctcctcctcttactatcctggagtgtcacagagaaaacacaaaaattccataaagatacatccaaatttcagaacacaaagcaacagaggtaaaagaaatattcctcccagaagataaactcataatcaaaagtctaacatgaaaacaaatcagtaggacaaacaaatgagactattagaaaacttaagaactaagggggaaattattgtgagctaagcaagctctctcaaatgtgactaatacaaaattctaagtagtagtatttttaagatcttcccttttttttaataattatgtgtgtttctttggggaactttgctgattatcgcacttggattgatcattctgtagtctaatttttctcatctggccaatgattttttcccattaatgaccaatattaaagaagtctagattcatcagcatggtgcttggactctgttggccattgattaggtcagtaataatttctccttccttctttttctcttttttcttttctttctttcctttctttctcttttcttttctttctccctcctccctcctcccttccttccttccttccctttcttctttttcctttttttttttcctgacaggctaaccccttttttccttccccttcatttctctttgtaagacagatacaaggttcaccagaaacaaaagtcctcttcacttcagttactaccacagcctggagatggttttggctgagtagccagggttcttggtaggacttttttctttctgggtgaccccctagactggttgcaagtgaaaaaaacacaacaacaaaatgaaaccacatggtagaatgatcatgaggctgagcattttcttccttgactaaactctctgttctgttcagtgatattacaggctttcccttagctggatcatgatttcataagtcccccagccaaggtcgaagaatgcaatatgggctttcaaatttctcttcactttccacctttcccaatctaatcacagattggagcagtatgtgctagctcctggcatctttctttagtctactaaataattatttgggatgctaacaatgttataataagagcctgggacctttcttagttccattttagctgtatatttctgccatttttttttgtttatagaaatgggcacttcacttggcattactgccaacagtctctaatttcttcctctctggggaaatttctggacagctagggatggaatgcattggtacaactccacacaatgacccagacattctaggaatatatttgaagtgattacatagataattgctgtaatggttaatacccagtgtcaacttgattggattgaaagacacaaagtactgatcctgggtgtctctgtaagggtgttgccaaaggagattaaaacttgagtcagtgggctgggaagggcagacccactcctaatctgggtaggcaccatctaatcagctgccagctcggccagaataaaaagcaggcagaaaaacgtgaaaaagctagactggcttagcctcacagcctacatctttctcctgtgctggatgcttcctgccctcaaatatgggactccaagtttcttcagctttgggactcggactggcttccttgctcctcagcttgcagacagcctattgtgggaccttgtgattgtattagttaatattactaaataaactcccatatatatatatatcccagatatatatatctcccatatatataaactcccatatataataatatatatgagtatatacacatatggaatatacacatatggaatatacacatatggaatatatatacatggaatatatatacatggaatatatatatacggaatatatatatacggaatataaatacacggaatatatatacggaatatatatatacggaatatatatatacggaatatatatatacggaatatatatatacggaatatatatatatacggaatatatatatacggaatatatatatacggaatatatatatacggaatatatatatatggaatatatatatggaatatataatatggaatatatatatggaatatataatatggaatatatatatggaatatataatatggaatatatatatatggaatatatatatatatatatggaaaaatgttgcatgtgtatctttggcagggttctctagagggactgaacttctgcagcattgtttctaacaggaaaactgagaaacaacctgtatatctttcaatttattctcaactaaaaagttttggtacatccaaacactgaaatactacatacacactacaaaaaaaaaaaactgacttaaactgacataggtatacaataaacaaggaaggtgtgatgttcgtagtatgatgttaagtaattatataatagtagatataatattatcctgtgtgtatatgatagaaaaatgtattagctaagaaagagtattttccagtttagattgtataaatactataatttttatggcaaaacatataagattttaaaaattatattttttaaagttaaatgaatggaattctccactttgacaatttttaagtgtacaattcagtgacattaattgcattcacaaaattgtgcaaccagcaccactgtctagttctcaaatttttcatcaacccaaacaggaattctgtaaccattaagtgataactcccactctctcctccccctagccgctagtaatttttaatttctttctgcctcagggaatgtgcctaatttattaatagatattccatatgaatgtaagcatacaatatttttccttctgtgtctgatttcaagcaaattttgttttattatatttttgccacaataaaaaaaattaaatggattgagacactgagaatttatgggcaataactctatattcattttatttgcaacagttgtttttttttttttttgcccaatctaacacaatcctgctaaattttctgattcatttgcttctgtattcatccaatcaatgtttcatattgctctgctgcaaaatctgcttgttggaagcatgtgaaagtcagcaactgcatgtcagctctgcttccatcaggcctatcttcttaccgctgcttctgactttagggtggtttctgtggcagtggtcctcctgtcacttttggaacaagacacattttgcattgaagttgttgcttgcctgacgtcctatcttcccaggtgtttcacaggacacttttaggctgactttttcagttgggattctgaaaccacaggttgtacaagaagcgtggtgccaatatctgcatccagtgaggcctcacactgcttctacttggcagaggtgaagtggagccagcatgtgcaaagatcacatggtgagagaggcagagagagggagaagatgccaggctctttttaactaccagttcccctgggaactaacagagtgagcactcactcataattgcaaggacagcaccaagcaattcatgagggatacatccctatgacccaaacacctcccactgggccccacctccaacattgggaatcaagtttcaacatgagattcacagggtcaaatatccaaatgatagcagatggatagtgacttttttttacaggtcagagaataaagttatatggatcttacagaagagagagaaccatcagttgatatcttaaccacttaccttaagactctaatgaacaaaacataagaaaagtccatcaaagttttatttctaagaaataaacttgcatataacccgaacgtaacaactctggtattacatcaatacagctataacattaatgcagcaattatataacacaaaagtgctataatgacatgggaaatgttcatgaactgtgaggtgaaaagatacagaaaatgactatgcctactgatactacctttgaaaaaggatccataaaaaatacattgaatataagttggctaaagaaaatattaactgcggtactttcttacagattatggctatcttcttccatataacttcaatatgtactaaaattcacatgcatttattttataatcagaatgtcattataattaaatgttatgctgtgccatttcatcagtttatcagaccttcttatagtcaatgtcacattaaattagaatccgagtaaataatgtttaaaaatagctgatacatttgaagttcaggctaaaaacctcatatttttatttgtaaaatgttctcagtgttagctttattgataataaccgataaccaacctaatattgtatgatttttaaattatttttaagcacaaaatagacccatgttggggatgaataacatgtctgattttgttaattttgtctactacttttccctatatttccttgtttccttcatcctaaatttttaaaaatgaaaactgtaatcattattgaatgtttattaaatgttttcttttgttaactgaagtaaaaggaaacattcttgtagaattatggaaactaacaatgtagtaggacctaaaattgaatgttaggaggttcttcattttaagggtcttcctgtgggagaagtttccattcaactgttgtatcaattttatcatcaacatttcccagctcctgctctttacagagttctaagaatacctaagtaagagaaaataaaaaagatacaaaaatgtcagggtgtgtctgaaagatggattcacacagaggtcatctggatggtgctcactcgttcaatgaaaacccacctgctccaaggtagcctgagagaggctgtattcctccaggttgaaggtctgtttcactgcatgtaaagagactgacattagtggcttatatatttttcaccaagtgtttgtaaagtcatacaatagagacagtagcttcaaattgtttagatactgtaagatataggccaaataattacattttcttgaaggataaagaagagtggtgatatggctaataaaagatagccatgcatgaacatattcagtttcctataaactcgaaaaagctccttgtgtcctattttagtattatccttttgattctttacatatatgctttggactccaaatcagttgtcgagaataatttattctatatttgtaaatctacagaggagtccactccatgctggctcccttttcacacttgtacattctgcgtcaatagccataaatacgcagtgtctctggaactagttcagaagcccctcttcaatagtgacttgttacacctcacccctctgtgttttctttcgctgaccttcactcagtcctccaactgttgcctctgtacatttgctcctggtaccttggcttttagaaacatagagacctcaagagctccccttgatattctttgggacaacattctcataattatccttcaattctatgcacgggtgtcatggtaagaaacagccctggtaccccaattcaatcctgcaggatagagtaacctgactgacttgtggctgggcttcctggtcagcacaggaagaatcaggtggaacaaaccaacatctaggaccatgacttcatttcctttgagattgttatgactatcctggtagggatttttcaagttttgattgattatttcattgttctacttcaaattacatagtctatattccacatgaaaatatgcaaccaatacataaagtcttatttatatatacccaaacttactcgcctctaacttgaaaaaggcccgagatagagggtggacatcctccacaggtaacttatacgccattaaagaggaatatctgtcaggaagaagagtgagatttattactaagtttcagtgtgataatacgggggaggaattaataggcaaagtaaaataatttttcaatgtgttctttaaataagtgtctgatttgatatagcatgaatcagtgtgaaattacagattcaatcataaaaaaagttataacaacaaaaatctggttgcctctaattttatgttaaagataaattctgagaaatagctctgattaagaatctttcccactcagcctgcactttgttattgtgctatatttcttacttactctcaaaaagcaacctttctagaatgtttacattacctttcccctctctcataggagagattgagatttaattttcaatctctcctataaaaattaaaatatgttgaactctctcctgctaaaaaaaaatttttttcttgaccttcagaccccctttcatgttgcacaatccaaggaacactcttcagtcctcattttgcaaacttttcaaaagcattaaataaaattgtacacaccctccttaaaacaaacatactctttctctcttagcttctgagacaaccacacttacgattttccttctaactctctaggcctgcactgcttaatagagtagctattaaatccatgtggctatttaaagtaattaaaataaataaaattgaaaattcaactcctcattcacaccagccacatctgaagtactcagtagctacgtatgtgtagtgactaccatcctggacagcacagaaaggacattttcattatcacaaaaattctactggccaatgctgttctagatactcctcagtctttgttggtatggttgtggtggtactgtccacacaggaagatttattttcttcctcaatcccatctcaaagctgagagctcctggggttcatccgacttcctatctctcttgttggcctcaacattctcctagtttaatggtcttctatatggtaaaaaaaatcccccactttgtttgttgccagaccagatctcaatgacctcttccttctcttgtgagccacaggtctacatctcttactttggcatctccacttggatatctctttacacatcaactacatgagcttttgtttcatccttgacatttgtagaattcattcttgacctaagttctttaaatgtgctgtttcctggaaacagtgtctgttactcccactcttcagctgaccaaaccctgctcagtcttaaagtcctacctcaatgtcatatcctcatttatttgtatcttcatttgcttaatatcttcacctccaaaaggaagaaccttgtctattttgttgactattcaatacacagccggcagcagataatacgtattcaataaatataacaaatattataaaaataaatgagtagaaatggtatacaagaaaattctgttcatctttcaattaaattcagcctcattctgctattcacaagggtttgattaccattacttgtaacacatggttgaccacatacaactttaaaagaaacattgggaggatcaaatgatttataattgaataatttaggatagagtcaatccttctcaagcatggaagtctgtgttacggagctcttgatgcaatttatattcagcaaaatcctgtaggtgaaagcattgttttcattgtctattttttaaaaatcattaaaaagttgatagtttaatttgtctgtactttgttcttaatctccaagccattccaccatttacacacatatatgaatgcacacacacacaccattcaccttttctgaggtctaaaacactcactgaaaataactgtttagtttttgtaacgcatcctagcaatcctcaaacaggttgttttgtgatgaataagtccactctgcctttctcttccggtttagactagcacaaaactaattgatgctaatactggaaaacactcatacttgtcactcaaaccgaaaacatcctttacctttcctgccaagcagcctgtgggaaaagcttcaaaatctctgtgtggagagcttccacctgggtaggttctttcatttttatttctagtaaataatctctaccaaacttgtttttcagatgttgaatggaaccaatacacctagttcaggggaaataaagaaaaaatacttgtctcttaatttcttcctcggttctcactgtagaggaaggtgtttaattacaggttagggagctgtagagcatcagctgttcatagcaaactgaaactctctctataagaacatgctagtcccatgctggtcaggacaggcacccaccttagcgttcctgacaccatcatggccatacggtcacacacagcctcagcctctgacatgtaatgggtggtcaagagggtgcccctctccttgtttttaacggtagcctgaagtatctgcctaaagataaagtaagggattgtttgcatttagaaagtaatttggggaaatagataaatagaaaaaagcaggaaatctaaagagaaaatgttatgttaggatgcaagaaacctgtgcaacatggtgaaaccccatctccacaaaaaaatttaaaaattagccaggcatggtggcacatgcctgtggtcccagctgcttgggaggctgagatgagtggatcacttaagcccaggaggtcgaggctgcagtgagctgtgattgcaccaccgcattccagcctgggtgatggagaaagaccctgtgtcaagtaatacaattaagtaaataaataaataaataaataaataaataggctacaagagaaaatctttgccatagagaaaaagaatagaaattgtgttatattgcctaatgatagtaccatattaataggcttcataaaaaagaagagtattggttaaaataatgcactattggggaagaaaagtaggaaagttggagtaaaaaatacagaaacatcatactatatgactttcaataactgaaaaatgaaatggaaaaataaaaagacagggggaagaggaataagaaagagaaatccaaacaaatataatcaagagtttatttgggtcttaaaatatctattttttccctcctgcaggaattttgaatgctatattaggtttcactgaattacataatagaagatgtgcacatcaaaggttaatggagcaaaatgtaacaaagaaacaaaacaaaaacaaaaacaaaatatcctagaggtattctcttgactctgacacttaatattcactctccttaccacatttgctgctgcccctcggggtccatcccggtgaacggctcatctagaagcaccactgatgggttccccaggatgctcagcacaaagcacagctgcaatgcaaggaacagcccgtcggcacccagccatgggtgcacagggaaaccccgagcctggcccatacctttctctttattccctctgatagagttttcacaggagccttaagttgttcctggagcttaagagcttccaccaatctgacaaaaaacagtgtgattatacatgaagtatatggcaaatggacctatctaaaacaactgtaggaaactctaagcactattattctagatagtaaatttaagcttccttaacgttttcataaatgctaaatcttatgatttggttcttattcaggtatttgaatcattttatttgcatgaaaatttaaagacattgtttataatttccttttaatatataatgaagaaatgacatattttccccttcctcctgctacaaattgtgagacttctctctgtaccgtgaaatactgagagcagcatcttctttgcccagtcctttcacagctgcatacaactccaagtgctctttcattgtaagcttgggccacagtgagttctcctgagggcagtaccccaagaacttgaggctgttgtcatgctgttgccttactgatgctctgctgccttgtaacaccacctgcacaagacaatgaatgtcagattcacctttggtttttgctccaatcccccttctactaaaggagataaaagtggccattaagctacaatattttttgaatacgcaagagaaattttataaattctttcatctattttttaaaaagatatttgatttactgataggaataatagaaagatgtcatcaatatttaaaataaaatttccttcacatgtcacataccactcctgcagttggctttgtgcacccagttatcattttaatggaagtacttttaccagctccattgtgtcctagtaatcccaaaacttcacctggaagaaagagtcaccatcaatatttgaattttcaaggttgactaatctaaaattgcttggttggttgcataacattttgaaacaaaatgacttttttttttttttttttttcagagacagagttttgctctgttgcctaggctggactgtggtggtgtaatcattgcctgctgcagccttgatctcctgggctcaagcgatcttcctgcatcagtctcccaggtagccagaactacatgcatgcaccaccacacccagctaatttttaaattttttgtagagatggagtcttgctatgttgcccaggctggtctcgaaatcctggcctcaagcctcccgcctcagcctctcaaagtattaggattagaggcacgagccaccgtggccacctcaaaataacatttctgaaacaaatgcttagttagcaccttgaaaaatctcctgtattacaacattaatacagagaatcagggtcttcttaatccaagactgggtttcttgccatttgaattgggacatgattttgaagtagaaaagacttatctgctgacatgtgaagaagttttataattacacattaaccaggatatatgaacagtctcaatgaataaaaatttgtcccctttgtagtcttaaatctagagaataaggaacattataataataataaaaggaacaattgttcaaaccttttttaacacaaaaggaaacatttctgatggctattttcttctttcttgttgaaaagcaacttttctttgtctcataatattccttgtgtaaacagcttgcagttatgactggttcctggaaaacatgacaaagcatgatttccctgttaaatttcagatactttacgaattgatgttttattttccattccctagtctataaacccaactaaatttaatgccaggctgaagagctttagcctcttttttcaaataaaatacccaaatgtatgttcataaataagggctacttaatcaactactaataaaattaattcctaatcaaatacattccctttgcattatgctagcagctatctttgccctttcaacaatttcattcccagtttattccttattgatttccatgcattgtaaattcatttgctcttgttcatatgctattcagttattaatattacaagcatactataatataaaatgtaattgcaactcttgaaaaatgtgcgattttgctaaaattgattaaaaaattcgagaacttgttgattacactgatgaatgaggagctggaagagtaagacccacagaaaactgaagaagaaaaaattaaaagaatgaggacagggtagttacttttaaagagaataatttgaatataagctataaatagaaatattaaagaaactaaagcagcttttcaaaataaaaaccaacatctcatcaattctagaggacaaactatctgagcattttattaagggtctaatccctgctgttcacctcctccaagtttggagcagtgagtgcatttgctgcttggactctttcagcttgaacatcttcatcttcttcttcgggctcttccggattgggatgagtttctctactccgtggagagattctacagaggaaataaaataacataaaaatgcaattttggctgtacaactgttaagaaaatgtaaacccctataattaaattattatcctttttaaaaaagactatcacatcattaatttattacctacaagattcttcttggcagtaataacacctccggtagccaagtcccttgaaatattctttgactatttcttctctttaaaacattgtatcctatctgtcaactggctctgtcacttcgttcttttaaatcactcaaatgtagacatacgggtcttttagtctgtcaccatccagatcatgaccacattcctcataaaagatcatcctaactggttttatatggaaccagtttttactgtaccttctccttagggacccataatggccacaaccaggagaaaagcaagctttgatgcttaaacactacttacagacatgtacaggacaaaaacttatcttgcctaaaatcagaacctatgacttagaaactatccctgcatccaatctaattctgttttctttttctgaaaatagcactgtgcaatatgcttagccaagtgttgggtagtaaatccattttaataaactgatgttaaatgtactgcaataaagactaaatatttaagatcacaacaggaggattacttgaggtcaggggtttgagaccaatctgagcaatatagcaagatcctgtctctattttcaaaaataaaaacaaataaaattataaatttaagaagattaaatatttaaattacattcagatctcaattagtattctcccaacctgaaaccctgtttctattttcaaaaacaaaaacaaataaataaatgaaattataaatttaaaaagactaaatatttagattatattcagatctcaattaatattttcccaacctgaaaactgggtctttattcattatttcatttccatacttcatttccagacaccttatgacaaaaaggaaaataacactctgaaggtatggctaaaagaaaagaaaaataatcagaattagcatcaccatggcattcacactcaatggtgaatatttgtccatttttttgtcacagaagatttgatcattttcttgaagatttgatcattttcttttaaatttgacaagcaacttgtaaaatacttctcatgtggaagaaaggtttattcaaactcaccctcccactgagaaagaattaaaaagcccacattaatttttttaaaaacttttaaaaagcatagaagagctaataaaatagtatgggcttttaaagccaaatctaaatgaatacaggagataggtttagccccaaagcaactcttgtcctagagttattctttatccttgaaatactcaaacttccgttttcatgccatgtccaggagcagaagacagaagaaactgttgaagcagagagtcttccccaagtaaggggtagataggtcactctttctctaataaaggatggacctcaaagggttatatttttagtgaggggtgaaaagaaccctcaggatattgctaacatcattgccttgagtgctcatcatggaaggagaaagtgaaggtggaaatacaagccagcttttacacagacttggagcccaaattcacatcgctggatggtcaaaacaaaacctcaagcctaggacatggtttaacatggtaccagactggtagtgtccctgtgaacttgacagaagcaaacaaaatgtaatagttatcccagaaacagactctacatatataggcaactgatatatgaatagaagtagctctgaatatcaatgggaaaggcacagacttttcaaaacagttgtctcaactgctgggacaactggacatccttaaagatagaaataaaacaagtccacaggaaaaaaaaaatgaattttagatgattgaagacataaatgtgaaagggaaatataaatattttagaaaataatataaaataatatcttcttgaccttagggagggggggatttcttaaacattacagaatataaaataaaatttattaatttttaatggttttatttaaaataaattaatcattcttaacagaggctcacaggctttgagaagattccagattcattcttgataaatactagaaacaaacaaaagacaaaagctctcagtaactcaggaattgagggatttagtaagataaatagtttatatttttaaaagttactatgatgataatggttaagcactaagaaaattctcagtaaaatcagaaacaatgtaaggacgccttcttgcaacagtgttagtgttagtggatgatttttagagattcaagccaatgtcataaagcaagaatatataatgcagtatatattttcaaaataaaaatataattatttcataacatggttgtttcaccggaaaatgcaagataagaatctgaaaaaaaaattggaaataagaaaattcagtaaggtaaactgatataagataattgtacaagaattttatatttttgtatagaaacctagctagaacgtgcaatgggaacaaaattttatggcaaataaataaatacataaataaatgtaactgaatatacacaaaagggaaataaagtaaaaatataaaataaaatactaaagtatataaaataaaccttaaatgcagataaacctttaaacataaatattttcaactcacaaatactgctctagcaaaataaacattaacaataatgtccataaaagtccacataccagtttctggcacttgactgcattctaattttcatcaataaaattgagtaggaaaatagaaaagttttgaaaaattaggatgataggacatatgtatcattttgaattgatcaaaatatataaagctaccataattaaaacaatgtagtcctgacactgatgtaaacaaatggatcaatggggagaatatcaacacaatcagtccatagatataagcaaatttaatactgataaagatgtcatttcatgttggaagacataaaatggagtattcataaatggcattgagataactaaatgcccttttttggaaaaacttaaaatacaaaggttagtctatatctaaaaacaaatcataaaatatatccagaagattaaacatttaagtattttaagaaacagcaaaaattataaaacaggaaagggtgacccacattcagaaaaaaaaattagttaacagaaattggttttgagtgttatcaaagatgtagaaaagctactatacattcactaaactaaataaagtcatatttcaaaaattaaagtaaaatatgactcaaatacagactttctattatataattgatctgaagaacagaaagaaaaatgatgagcaataaataaacagagcctcaaagattatcaagcataccaaatatatgtaatggtagttccaaaaagataggggagagagaaagaacagaaaattttttttaagaaatgatggcccaaaacttccaaaatttgttttaaaaaatattcatatacacattcaaggagcttaacaaatcataggtaagataattacaacaagatccatatctagacacatcagagtcagattgctgaaaatcaaaggcagagaaaacagtaagtgggagaggattcatcactcagagagaagcaacaatacaatttcttctcttcagaaacaatggaggccaggagaaagtgtgatgatgtaatcaaagaactgaaagaaaaaaagtatccaaaaattgtatatccagtaaaataatttttcaaaataaaatcattcccaagttgttccaaattgccttaatgtggccatcattacattaaaaagggagacaataaaataaataaatcagctataaaatttttattttaaaatagaccaatggaatagaatagaaaacccagaaataaaccctcccatatatgctcaaataatcttcaacaagggtgccaagaccactcaatgtgaaaaagacaatctcttcaacaaatagtgctaagaaaactgatgtcaatatgtaaaagaatgaagtggaggccttatattatacacaaaattaactcaaaatggatcaaagacctaaatggaagacctaaaactataaaactcatagaaaaaaacttaataaaattggactagacagcgatttattcaatacgacactaaaaacacaaacaacaaaaccaaaaatagacaaatgtgtttgcatcaaattaaaatattctgtgcatcaaaggacacaactgacatggtgaaaagataacctacagaatacaagaaaacattttcaaatcatatatctgataaggagttaatattcagaatatatttttaaaactcctacaactcaataacaacaaaaattcaaataacccaatttaaaaatgggcaaataatggccgggcacggtggctcacgcctgcaatcccagcactttgggaggctgaggcaggtgaatcatgaggtcaggagattgagaccatcctggccaacatggtgaaaccccctctctactaaaaatacaacaattagctaagtgtggtagcatgcacccatagtcccagctattcaggaggctgaagcaggagaatcacttgaacccaagaggcggaggttgcagagagccgagattgcaccactgcactccagcctggtgacagagcaagactccagaaaaacaaacaaacaaacaaaaaaaccaaataacttgaataaatatttctccaaagaagatatataaatggccaacattaaatgtcaatgaaacgcaaatgaaaaccacaatggcataccacctcacatccattaggatgactactatataaaaaaataagtgttggtaaggatgtggagaaattggaactcttgtacactgttggtgagactgcaaaatggtgcaatttctatggaaaacagtatggaggttcctcaaaaaataaaactagaactaccatataattcagcactcccacttctgggtatttatccagaagaactgaaagtagcatcttgaagagagattaacacacccaagttcatagcttacaatagccaagaggtagaagtaatgcaaatgtttattgacagaatgaatagattttttaaattatggtatatacatataattcaatattattcaaccttaaaaaggagtgaaatcttgacatatgtctcaacatggataaaccttgagaacattatacagagtgaaataagctagtcacaaaaagacagatactttatgatttcatgtatataagatatataaagtagtaaaatttatagaagcagaaagtagaatggtgattaccggtttgggcaaaggggaaaagggaaattgtttaatggctatacagtttcagatttacaagattaaaagttctggagattcttctcacaacattgtaaatatgcttaaaaaactgaactatatatttaaaaatcataaggatggtaaattttatgttacgtgtctttttattacaatttgaaaagctgaaaaaacttatatgtgaaaaataattgcagttgtttttaccaccacaggtcactgactagaaacaaataggtaaatagccatgaagtataatgtggtgggatgtgacgaaagccgcttctaggcctggccgttaaaacaaggggacttcaaaaataccatgaaaaattcatatgatgaaaaacctatgtgtggatttcaaatttggggggcaacaaaataaactcatcctaacttcttataatatgtttgaacaggatctggtttgaggtactaagaagggtacattcatttgaaaataggtacattcatttgaaaagagcccctatcagaacatgaattctgctaaaactgaagcaagaacaaacatcaagtgtatggagaagcttggaaggaagaatggtgaaatcatcgatgctgtaaaaaagtttatgagggcaatggcccaaagaaattagcaacttacagatggttaagtggttttaagaaggaacaagacaatgttgaaaataagtcctatagcagcagaccatccacatcaatttgagaggaaaaaattcatctctttcatctcctaattgaagaggactgacaattaacagcagaaacaatagtcaaatcacagacatctcaactgattcaattcacataattccgattgaaaaattaaagttaatcaaactttctacttagtgcaggacaaaactgttgtgcccaggttagcagaagacaagagcagagcattcaatggagattttaaacacatgggatcgagattctgaagcaatttttttgaataactgtttacaggaaataaaacatggctttaccagtatgattctgaagacaaatcacaatcaaaacaatggctaccaaaaggtagaagtgggtccagttaaagcaaaagtgaattagtcaacagcaaaggtcatgggcaacagttttttggatgctcagggcattttgtttgttgactttctggagggacaaagaatgataacatctgcttattatgagagtgttttgagaaagttagacaaacatccaggaaatctttactagaaggtccttctccatcatggcaatgttcctgctcatttctctcatcaaacaagggcaattctgtgagagttcctttgggaaattattgaggggtatccacctacagttctgatttggctccttctgaattctttttgtttcctaatcttaaaatatatgtaaatggcacccatttttgttcagttagtaacgtaaaagatacttcaatgacaaggttaaattcccaggatcctcagttctgtaggaatgaactaaatgattggtatcgttgcttacaaaagtgtcctcactttgatggggtttatgttgaaaaaattacatatatacatatacatatacatatacatatacatatatatatatatatatgagacggagtctctctctgttgcccaggctggagtgcaatggcacaatctcagctcactgcaacctccatctcctggctcaatcgattctcctgcctcagcctcccgagtagctggaattacaggcacatgccagcacgcccagctaatttttgtatttttgtagagatgcggtttcaccatgttgcccaggctggtcttgaattcctgacctcaggtggtccacccacctcggcttcccaaagcgctgggattacaggcgtgagtcactgcgcctggccaaaatttatatttttttattttcaacttttagttccattttcccatgaggattttggagtcccatcttgtctaatgttctaaccttttcttccactgcaaaggcaaccctgaagattgaggggtgtcaaaaagcacagccaccaaatggaggtgcgcagccaaatacacaatagaatttatttgaaaaataaatccctattaagtcttgaaggttccagggtttgtttgctgtgtcagagttgcaatgaacatatattccccagctggacaactgtatgcctttagaattcaatggtcaattaaaaatgactatatatggaacatctctgcatgtatttacaaaacaggaaaaatatacattcattatacaaagacccaggtaaaaatgtataaaagtttataaatcaaaacaaatttagaggtttcttccttgataaactgctgttctgctattaaagaggaaacaagaggtgtgcaaacaagagtatgtttcctccttctgcctcatttgccataatacacagaaataacatttatattcgctttcattgtctttccccactataaaatttcatttaatctttctcctttcctcctcattattcaaattagttgttattaacacatatttacttgattctgagccatacaccatatgctgcatttcttacatactgcctcaaattgtctttggatacatatcaacaatgtctatcacaataacagcaaccaaacctttaaatgttctagtatgtattatattatctgtgaatctattttaaaaatatctttagttcttgctgccattatattggaatggaaaatacagaaagagtgggtattttaagacatttaaatttggcataccttgaataagatttcacggggctatgaatcttatgcaatatatatatttaggtagaaaatgttccttactattaaggttgttaaaagaatggttttattgacttcatttattctattgtccagactgtccaagtttctcataaagtcgagctgaaaaaaaacccaccaacagttaaatgcaagtttctctataaatataaaatttacacattaaatacacccacattatacttgatgttctatgggacaacagtaagtattccatgaattgagatgagaagagttgttttctgatgctaaagtctactgatgacctgacatctttccttagttatgaactccaacactgtttattttccaattgtatgtaatagggatttccaagtttctctttagtgggagtgacaaagtacagaactatgaagtaggcaagatttgcccacagttccccaaaattctcagtggtatttagtttctgtcagaagtggttaatagaatcatgttttctttccctcactcacaagtcatacactccaaaagcaatttattgacactaagtagtatgcaatcaataagtccaataagattttagacattgatcaacattgaaatgaaaaacttctatcccctggcaagatggattcaccacaagagagcatgttttataacaatggaaaagttttagtcctgtctcagaatcacctctggaattcataaaccacggttgggcttcctgctgtatttctgcatggattgaccctcttcctgctagtatgaatagtgatctcagcaaatttgacagctttcaattttatacagctttaaaatcttatttttagaatttatcagcattgaataacttcaaaattttataaatgcacctgttccgacaatgggtaaggattttattaatgggctacaaggtcaagactggagacacagtaggtaacactgcttacctggatcaataacatgacataccccagcaaagtgaaggaaggtatgaaaatcatgcacaaaattaagttgagtttttcatattgagttgataccataattgtggatacacatattaagatctagaaaaaaatccagaagtattataattttctcagttatatttgatatcttaagatatttcctgtgaataacctgttttcctgggagatactgccattttcaacttttacctcacagatagaaatattcttaggatatcctctttaggaagtctcaaactttcactgcaactaaaacataggattacaataaggtctgtcataaataccttaaagattttgcaatacccagtagggataaacagcaacaataaaagaaggtgatgtaacattatttattttgtctattataataaatcttaatatgttttcagtacaaggatacagtgaagaattaactgatgatatgacttgggaacttaaaaggcaaaataaactttgaggttggtgtttattgccatatctaagcagtcagagaaatgtaagaattatcagtcttgatatccaaggtaggaatattgaacagtttagaacattcccagaggtaaattatatggttgtcactttaaagggcagcccatatccccactcagactgttagtcgtttcctaaaatggctccctggctccagttcttctgccattcaaaattcatatgacattccaaagagtatatacagttaactcttgaataacattagtttattgtaggtggatttttttcaataaatatgttagaaatttgggggaagatttgtgacaatttgaaaacctcacagatgaaccacattgtctagacatattgaaaaaaattaaagaaaaattaggtatatcatgaatgcataaaatatatgtagatattagtctattttgtcatttaccactgtaaactataaacaaatctattatgaaaagttaaactatatcaaaacatgcatagaaactcttacataccatacatgttgccattagcaatcaagaaaaatgtaaacataaagatgcagaattaaatcatgactgcataaaattaactgtagaacacactgtactactgtaataattttgtagtcacctcatgttgctactgtgatgagctcaagtgttgtaaatattcccttaaaatgctgtgtgaggctaatcatcttattctcaagcaaatggcatatctcagtaaaaagtggcttctcatggttcttgcagatctttcattgtgtttagtgcaataccataaactttgaataataccgtaggacctaggaattgccactagtgattccagaagttctcccaagaagcagagaaaagtcatgagattacaaaaaaaaaaaaggttgaattgcttgatatgtaccatagattggggtctgcagttgcagttgcctgccatttcaaaataaataaatccagtgtaaggaccattgtaaaataagaaaaggatatttatgcatctgtcactgtagccacaccagcaggcacaaaaaccttgcactttttttgaaatactttgaaatctcacattgatgatccaacttttatacctataggctttaatacaatttgagaaaaagtgaagtcattatatgacaacttaaataaaaggttaaagatctaaggctggagaatgtaatgccctcaaaggatgctttgttaattttagaaagaggtttaacttaaaaaatgtcaagataacagagaaagcagcttccgccaatcaagaggcagcagacaagctcccagatgctattaataaaatcattgaagagtaagtgtatctgcctgaacgcatttttaatacagatggaagtgccctccctattctggggggaaaagtgccacaaaggacactgattagtagaaaacagaatcaagcaccaggatttaacgtagaaaaggataggctatttgtgcaaatgcagttgggttgatgatcagtactgccattatctataaaagctgataacactcaagacttgaagggaaaagataaacaccaattgccagtcttttggttatacaacaagaaggcctggacaatgagaaccctttttctggattagttccatggatgctttgtccctaaagtcagcaagtatcttgccagtaaggaactgccttttaaagttattttgctactggacagcacccttgctaacccagaaccatgtgagttcaacactgacggcaacaaagcggtctgcttgctcccaaacacatctctaatccaacctctagatcaggggtcataagaacttttcaggctcattacacacagtactctatggaaaggattgtcaacatcatagaagagaacccaatagagagaacatcatgaaagtctggaaggattccaccattggagatgccattgttatagaaagagctgtgaaagccatcaagcatgaaacaataaattgctgctgaagaaaattgtgtccagatgttgtgcatgacttcacaggatttacaatagaactaaacacagaaataaaaaagagattgtagacagggcaaatagggtggggagtgaagggtttcaagacctggatcttggagaaattcaataactaatagacaccacaccagagaaattaacacaagacaatttgatggaaaggagggtttccattgccagatgatgagaaagaagatgtagaagaagcagtgccagaaaaagaattgacattagacaatctgaaagaaggattctgattattcaaggctccttttgacttattttatgacatggaatcttctatgatacaggcactgaaacaaaagcaaacagagggaaaaggattggagctatatggagatatttttggagaaataaaaaagcaaaaagtaagacagaaattataatatatttctgtaaagttacaccatgtgtgtctgtctctcccgcctccccttccacctcttccacctctttcacctctgacacccctaagacagcaagaccaactcctgctctaccttctcttccttcttggcctacttaatatgaagacaacaagaatgaagaccaagaatgataatccacctctacttaatgaatagtaaatatatctttcttatgactttcttaataacattttcttttctctagcttactttattgtgagaatacagtatataatatatatatacaaaatacacgttaagcaactatgttatcagtaagatttcagtcaacaataggctatgagtagttaagttttagagagtcaaaagttacacatgaattttcaattgcatgagggtagggggttggtgcctcttactccgacgttgttcaagggtcaaatatattttgatttgaacaggaatcattctcttttatattccattgaatttaagtcctctgattgcagaaaatttgctttgttcatggttatatcccaagcaaagtatctggcacataggaagatacaatcaatatgaatgaatgaataaatattgggaagggcaaacaataaggaggatttctatttctctgtttttattcaccaaataatcaaaaaatatgcatattaacagtgcagttgatacaaaacactttgttaaatagttactgtagttacaggaataaaattggaggaagaaaaggaagattacacggtttggctctgtctcccaaccaaatctcatcttgtagctcccataattcccatgtgttgtggaagggacccagtgggagatgactgagttatgatggcaggtctttcctgtgctgttctcatgatagtggatgggaccaacaagatctgatggttttcaaaacaggagttgccctgcacaagctctctctttgcctactgccatccatgtaagatgtgacttgatcctccttgccttctgccatgattgtgaggcttccccagccacatggaactgtgagttctccattaagcctctttgtaatcttgggtatatctttatcagcagtgtgaaaacagactaatacagaagaagaggataataattcctattgagtacttcatgaacatttactatttatcagatattttaatgagcagtttaccagcactataatagtttatgctcttttaaaatctcaatcctaaaacactagaaagtactactgttattatacatatattctgatgtttaaataactgaacctcaaaagaactgaaataatgtgttcaatttcttatagctactaagtgccagaccactgaggattaaaacctggggctatctaactctagagccaaaattcttaatcattatactttcctaagggatattgtatcagtcaactgtccatacatcaagtcaatatataatgtactggataccatgaacttatatatacaaaacagatgtttctaaaagcctaaaacagagaagcagacatttgtgaactggaagattcactatgtaaagatatcatttctcccccaaagtaatttatagattcaatgcaatcccaattaatatcacttcttgtggaatttgacaagaagattctaaaaagtgcacgcaaatgcaaagaatcaaaaacagccaagatacttaaaaaagaacaaggtgggaaggtttgctctctcaaataaagctaccataattgagacagcatggtattgatgtacaaatagaaaaacagattaatggaagaaatcagaaaggccaggaatagtcttgattgataacaaaggtagcactgcaaagcagtgagataatgatatggacaagtggatatataaatatgatacgtatcaaaaaggcatataaacagtgtttcttccgtatgtacaagaaaaattttctgaaggaataaacaatataaactgaaataagctcagggtttcatcagcttattttataaacattgtgtatacttcagaatctcctcaaagatttcgtggccatagtatttgtaattattaaaggtattgctctaacaaaatatatagcaatatatcttcagtattctataaaaattaagttggattttctggccgggcacggtggttcaatcctgtaatcctaacactttgggaggccaaggtaggcgggtcacctgaggtcaggagttcaagaccagcctggccaagatggtgaaactctgtctttattaaaaataaaaaatttagctgggcatggtggcgcacacctgtagtcccagctactcaggaagctgaggcaggagaatcacttgaacccgcgaggtgaaggttgcagtgagccaagatcgccccactgcactccagcctgggcaacagagtgagattccgtctcaaaaaaaaaaaaaaaattacgttacattttgtaaatctaacaatgcaagtgaagaatgtatctttgaccatcttgcttctttcacctttattccattcctttttgtcttcttactacactaattaccacatctatattgttttactcatcaaaaaaaaaaaaaaaaaaaagaagtcttccattaaccattccttctggcaagcaatgatagcaacaacaatgccttgtaaggagtaattaaacacttcctgtttctgcttctgcattctatatttattcttccatctgctacaaactgtattctgcattcactgctttataaaactgcagtctcaaagttagttgtagacatctgtatgtagagatatgatgtaacagataccctaaagggtcttacccatactgtacaattaaattttgggaaattgaaacaactgtcccttacatacactgctagtttcaagggaaaaaaaaaaagtgaggaaattcttcaaggacaaaaacaaagcctgaaacccaccttggaccattaagtaaacacaaaatctgcttgggctgaggacaagtccccatatcagcccatgagttaggaagatatgatttgggttctctttaaagtcattccctgcaaagacctttaagagactaaaatgaaaccctcttgatgggaattccttgtaaatcccatattgaggcatgatactctaagttggcttgtacaatcgtagatggattctacactgcatgtctcacaaaagtaagtgaaaatcttttggggatgaaaacatccctaatacagagtcttcggagttccacactttaaggtcaaccaagtatgagctcctctccccgacaaaaacttatcaaacatataaggcaataagcactagatgacttttgagactagaattgtcaaacgacaagtagaaatgttgttttcaatgaaatgttgaaataaatcaaatatgaaatatagaacaataacaagtaacaaaagattaggagaaataactaagcatattttaaatagaaccaaaaagagttttggaaaacaaaattgaaattttaagtagtcaatgagtaaaaataatttagatgcagatgaatttaaaacaagtgaattggaagaaacgtctgaagcttccccagaaggcagcaaggacaaggacatggaaaatttgaatgaaatgctaacagatgtagagaatagtatgaaaagctaatattatctcagtagagactttaagtcagacaggcaatatctgaagtggtattggctgagaattttcctaaactgaagacagaaatgaattccaggcatcccaatttatacaaaaataaagataaatagaaaatcacacctagaaacattgtaatgaaagctaaagtcagagaaggttagtcaatgagagagcctctgcaaaggatagcaactgactgatagcagacatctgaacagttaaaatgtaagcaacaagagagtgaattttcaaagtgataagagaaaatgactgtcaacctagaaatgcataagcagctaaattatgttttaagaatgagggtgaaaaaagattttttttaaactacgagagtttatagctaactgacctgttaaaggaatatataaatgatgcattttgggaagccaaaaaaaaaaaaaaaaaaagattgatctcaaaagggaggaaaaaaagactaaaatccaagtatgaatagtgaacaaatagattgatttaaaatgtacacaaatcttttttaagttcttaaaatgttaataaaaatgcttatttgagggattaaaaaaagaaaaccaaaacactagacaatagcatgtaagtagggtaagaaattattaataataaaatcctcaaaatatggtgttggaagtaattaagatatttattaactttaggctttgttaagtttagcacataaaaaatttttcaggggtgttatgggctgaattttgcctccccaaaatatatatgtttaaattttaacccccagtagctcagaacatgactatatttagaaatagtctctaaatgggtaattaagtttaaaggatgccattgcaggagtccctaacccaatgtgactattgtccttataagaaggggagattaggacacagacgcgtccaaagggaagaccatgagaagacctggaagaagatggccctctataagccaatgggagaggcctcagaagaaatcaaccttgccaatagcttgaccgtggacttctgacctctagaattgtgagaaaataattctgttccttaagcctcccagtctgtagtactttattatggcagccctagcaaattaatacaaagtaataaaatatagattatgactttcaaaccaaaaaaaagaaaaatatggaataaaaacaaattcaaacaaacaaaaaagggaagaaaaaagagaaatcacatacacaaagcaaaaagtaaaatagtgtaacttcaagaatatcaaaaatcacaataaactcattaaattaaaagcaggttaagtctgaattaaaaaacaaataaaatccaactatatttcttttacaagagacaggcattaaagcataagaacaataaaagttaaaagtaaacacaagtggcaaaaaagatttatcaagcaaatactgaacaaaagaaatctggtgtacctatattaatatgagacacatttgactttatggccaaaaaccataagaataaatagggctggtgtataatcattccagacttcaatgcaccaaacaaaatagtttcaaactatacaaagcaaaattggattaaattaaaaagtgaaactgacaagcctacctttacaatggaattagaagagaaaaaaataaagatcaatgactaatgccgatggttaagaagacattacccttggttatgatatttgaccattgtagtacaaccattgataaaactggcccaaggaattatgtgattagctgtcacagggatgcgatttggaagcttagaagcaatttagtagcctttaggatttctgctgacatactgaattctccaactggttgtgtttgtgatattcctgcttatactaaatccaacttttaaatactactcacaaaggccaaccaatgtaactgtaacagctccagtgaagtaaaactttggtccttttaccctaatcccttcaccctgtccacagaaagagaaaggaaaatccagaagaagaagaagaaaaaaagagagagtcaaagtgtagaccttgctctctttctcaccgctgatccccaaactaagggcgtgcctaagatgagcctggggagagagttttacattgcttaagaaagttatgatttggacttgaccaaccttttagattttttttagttctttaagtgaatcttacttaacaaaattggactgttttaatgtttgaaatggtcagaaagctatagtaactgcttaagatatcagctagtgatagggaaggagatgcagtagcatatgcctgaagtaataagtaaattatttattaagaaaacagtttcttatttattttattcatctatatagccccctatcatgcttgttgtttgtttgttttttaaggaaggagaattatttaagagaaaaacatcactgagttgagaggcctgcgtttaagtctgattcttttcagtttttcccactctgtaaaatgaagaaatgtcctgaatgatctagtctttcagctgttacatgccatggttcctacatatattttacttctttccaaagaaacagagttctaaaaaagaaacctcaaagaacaaatgggaaataaaggaaataaaatgaacaaaacattctgaacccataaacatggtacaacaataatgaaagtacaaaagaaaaacaaacaaaaaaccctccattctcttctaagcaaagtatttatacttaaatttgcatttaaaaaaacttcaaggaaatttaatataaatgtgcacgcatgtatatatacttacaataaaaaagccaaaagaccaaaagccattattttttctccacttgcgaaagatgaatgaaagcacatatgtgaggaatataagagaaactgcacaaccaattatgcataccacctgcaaataatgaggatcaatggcaagattagaaatggcaggtcatagagggaaagaggaggggagataatcaggtcataaagctgcctaaggcaattttcttattttcttgcatattacatgccttttgctaatgacaaaacattcatgaaaatgaattttcattttgattctactattataattggcttgtggaaaaaatgatcacttaccaaaacaaacatgagttcccatgaaagctggaatcccagaaatatgaagtagtaaattaaatgtattgaaaagagaatcaagaagtataatggaatgtccaccagagcctgtccacaccagtatgctgaaggccagaggcctgaaatccataactgggattgaacatttttctgacaaagaatagaagggatagaggaagggatcttagtttgaaaagattttgtggttatgtaaaaaaaattgtttaataaattttagaaatagtatgttatagtgtctgtgtgacaaaaagcatcctcctaaaaatctagcatctccaatggaaatgtgtagttattggttcaacagaaaagtctcagctatttttaaagttaatttacccattgatacagattaatgaagatgactacactatatatttttaaagcccagtttattaaagcgtagttaaataattggaaacactgtatgtctgacatttcatgctatagttaaaaatctaaattccctttggaactgtgaaataactgcatggatcaaacagtaccacatcttcatccctgaagtttatttagcatgatttcccttacagctgtggcaattttattgtgctaaatggtaaactttctgacctctttgaaatcatgtgtttactataatctatactgatattagattgtaatgtatgtgtaaaaacattaaccaaagtacaactgtgtgtgtataaaacaataaaattgcaattactacagtcaaataaaatcaatctcaatctaatttcctctctctccctcttactttataatcgctgatgctgctcatgccgataaaaggagaaacgcagtttgtgatcaacaacaaaaatatggacccatctataaaaccaagatccagcactatgtcatcctgaaagatgaaaacacatcagtaagctgttgcaattgttacaaattatacaaacattataagatacgtttccaggaaataaagaaaaactctagaagcattcacctgatttaagaagcaaagagacaagcaaacatgttttgttaaccttagtggcaggttccattcccaggaacagcatgatataaaagaaattcaaaatctcaattttatatgtatatacggtagtctcccgtttccacaggggatatattccaagactccaagtggatgcctgaaacctggatagtaccaaaccctatacataatatgtttttttaatctgataactgaaatggctactaagtgactaatgggtaacatatacagtgtggacacaccaaacaaagggatgattcacttcctgggtgggaagcaggacagggcaagatttcatcatgctactcagaacagcatgcaatttaaaacatatgaattatttatttctggaattttccgtttaatattttagaactacagttgaccaaaggtaactgaaacatcagaaagcaaaatcactgtgaagggggactattgtacttagagggcatgagcagtttctcttttacatttacatctgatattttagggagctacagttatcatatctgaagcactgagttaagttgtcatttgttccagttccctatttccaagttggcctctaatagtgattgttgtgaagctggacttatgcttaggcattatgcctaactacgtgcaagatacaattagaagagagcaaatcttccctgcctacataatttgacttctaaaattgtttaaattaaacaattgtcaaggcattgaggggtctttaagtttttttcaagacactgtaatttattattattatgacaaaaaaaatctaaagaaaaggagtgcagaaaaggtaagtttttgtcataaatgcaggtgcaggtggaagggcaaaaaagaagcaatgaaaaggttgttctaagagtattagtaaagatgtgggaagaaccagattaccaggggctaaataaatgcacaatcatcagtgtaagggaagggtaacacttatgactccatatccctgcttcccagtatcacccctgggaaaggatattacccatgttgttgatcctgttgcttaatattaaatgggccaatgtcattggttgatgcacatatctgttttcctctctaagaatcggacaagacttcatcatgctactcagaacagtgtgcaatttaaaactgataaattatttctagaattttctatttaatatttttcaaccatggttgaccaagggtaactgaaaccgcagaaagcaaaatcatagataaagggggactactgtacttagagtgtacaagcagtttgggtccaactaaagagataccttttttctcctttatatcctgcactctctacttgggtgtactgcttaattttgctaccctaaatctctgcttttctttgctcccccatctctcttctgcatatcctcaacttcatcctaatgattcccaaagtatgcattatctccatctacttctctgggttccttgcttttaaaatattctacagaaagtatctacttgggtatactctgctttatctaatatactaagtcaaaaactaatactagcatctcctccaaataaactttccttttcaacttccccatttctatcagtagttttgtgactgtttcaatttcctaagctacaaaattgtcttcttacatgcatacctcttttttatacttctttcaatctgccatttaatgctactattctatgaaattcacatgagtttttcttttgtcacttattcctcttcctgtatgctggtccagacacttttgttagcttctgttggtccttgactggcatttgaatattaatatatggtaggaggatcagggggtccagatacacagaaggtcagagctaaccagtgaaagtcattattaggcagagttctaatataggcatttgaatccttcaccattgggattccaatgccatattagaacttgacttgtgaatgtccaattacgttccttagtatatttctatttataacttaagtatatcaacttcagaggcattagtgagaactaaattaaataatgtatagtgaggccagatgtggtggctcacacctgtaatcccagcactttgagaggctgaggcgggtggatcacctgaggtcaggagtttgagaccagcctggccaacgtggtgaaaccccatctctactaaaaatacaaaaaaattagccgggtatggtggtgcatgcctgtaattccagctacttgggaggctgaggcaggagaatcacttgaacccaggaggtggaggttgcagtgagctgagatcttgccactgcatgccagcctgggtgacagaatgagactccatttcaaaaaaaaaaaaaaaaaaatatatatatatatatatgttatatatatatatagtgaaataataatatttttatttgctacatgtagcatttgctatatgggaggtgctcaataactaagaatagttgtttttaagatgaaagcactagaatttaaaacagaccaggaagcaatatcaggcaagaaccaacaagtagctaaggaacagatgacacgtagcttagtgaagtacacatttcaaagtctagaaggataataagaaacaaaaagggcataattttaaaatagtgggaaaatgaggttattaagagaagtcatgacagctttagaagacaccttcagcaatcagaggcaatgtacagccaaatctagacgcaagtgagcctcacagaattgtggagatagtgactcttctatgctagtggttctctaagtgtggtcccagaccagcagcatcaacgtcacccggtacttactggaaatgcaagttctcagacctcacatctgatctactaaatcagaatctctggggatggtgtccagtaatctgttttaacaagcccagcaggtgatactagtgtatgttaaagtggaagcacctctggtctatgacttctgctggcatataaatcagccccaagatttgaggtgtccctgagaaaggatgttattaaatctgagtaaaagggaaattgtgactgaaaataaaaataaattatcctccacaatgggtgagcagtaaaatatactatactaatccctattcttactataattgatcattttgtttggttatgcatgagtaaaagaatgaataattattgttttctttaaaaagaaaatacctgtttctggtgaaaatgcaacaactagaaaaagactgaaattcttaactttcctaaagaaacacaatttccatttgaatattttaaaagttattcatgagggactaagagagaactcaccttccctggatccacaggagacaatttaatatccaaattgcttccttgacaagccttccgaacattaattttgtctagatttatatacattgcaagagaagaaggttatgtatctatgcatcatctcctctgttttctgattcggtttagcaaaaaagtagattaaagagctctatctgttgaacccaggaggcggaggttgcagtgagccgagatcacaccattgcactccagcttgggtgacaagagcaaaactccatctcaaaaaaaaacaaaaaaacaaaacaaacaaaaaaaaaacctctatctgaacctcgtcaaaagggaaaaatagaaccccatgtaagagacctacctaacatgttggagcaatcaacaacgaatgtatttgatgtctggaggtaatatgctaagacaaatattctgtgagttcatgagtaataatcttagtaagcagattcagaaactaaactcaggtaactgatgggtccctctggggcccactggccacatgagacccattcagctctgtgcagggtgaaaggctacctggaaaagataaatgtgtgtcatactgcatctgaagcaaaagcctcaagagtaacttctttcctcagctccatttctatttactccacctaaggattaacataacattccccaaaacactggggaaaagaaaggaggaaggaagaagcagaacagtcaaaaggaaaggtaccctctatcagactgcaggtgataaggaggtcaacccatgctactttctgcatgagcagaatttctttatcttgatattctctacggaattctctttagcaacacccagaggccctggcaagcttcctgctaccattgaggggaaaaccccaaataccatctttcttcctccagagctggctcatgctcagccagacctattttccctacagagaaagcttttttattaaatgcagggtgaactacagtggtttgcactcagtaaacccagcatacattcaattctgaaaaatccgaaagccctttaaatcatattacttaaaagttgcaagataatttttatgtctttacagtaatgaagagtttgtccgacaaaggctaactgtaacatgcttccacagtaatgataataatggctcatggttgtgcgatacattaaacacttttaaaaataatatcttagttgaatgttacgtctactttatgaggtagaaaaagcaagtattaaaataaaaaaattttaaagacaggactattacagattatctgcttgcagttcccatcttgcagaagagaaagctgtgccataatggtaacaaacggtgcacagcataaccagttatccagtctacccactcattcatccattcaacaaatatttatagagcttctgctccgtgcaatgcatcatcctttgtgctagaaataagtcaagtataattattactttcaagaagttcatatttgaaaaacaatgacaaactgagtctgaactcagttccactgaaaaataaattaggagggtctttaagcattaaagcatctgctgaaaagtcctggaggatgttaggagattgattaaaaaaaaagggaagacaacatcgattctatattaaaagtaaacaattaagggtaaataaaggcatgattaactctggaagtactgggaaatagatgaaattatattagatctcactcttgagaaattaccagaactaagttttgattatatttttcttatttttgctctgaactggtagcacattgctattaccatccagagagacactgtattgttttatattagatagtttctctacttacaattaaatcaccctatctcattcgcagaaaactagagtttgcattatatggtattaatttcttattatgcaattttccaataaaatttcattatctaaaaccactatgcatattcttgctaacatccacatgatttctataattttttcccttttttatctatcataatcaaacacaccagttaagaatttgacaatttagaaagaataactaaattgcatctgatcaaaaattgcacttcacaccccaagttataaaacataaagaagccaaaccaaaaaaaagcactgcagaattttaaatgacaaagaacaatagaactgttaaaaaatcataattttagaattggaccatattttatcataaatccctttggtggagatatacatatacatatgtgggtgtgtatacatacatacacactcttttgcatttgcattaatcagcgtatatgtcttatattcatctaactctccagggaaatctgacactctgacataaaattaaggatttaggtttaagatatctctgatattcttcatttccaaccaaatccattcactgatttaagtaaatacgcattgagtacctagtaagttgtatatggtaaaccaaagtcaaaattatgagttttcaacagtcctatgatttttttctcttttattttaaattttgcagtgtccttttggatcttggctcttctaatgttctgtgttggactgtgattcttaatcagacaagattttaaactagaggggtgaggccagccataaaacataactctacagcataccaagtggtaataaatgtaatggaaaaaataaatcaggataagggataggaagtgataggttacatctaatttactaagtaaataattatatatttaaatttttccataaaacttttgaattttaaaaatttaattagactaaacataacagtacttgaaagattcttgatctttcagaataagtaatagcaaacatgtatttgaatgtttcctctttcctttataggaacgtaagctccatatgggtgagatttttgtctattctgttcatgctgtattctcaacatctagaagtaccagaaaatagtacactcaggaagtagttattgaataaatttaaatgtgtatatatatttatatgtaaatatatatatatatgtatgccatgctatgttctaggtactcagtaaattcatttaatcttcacaataattctataaagtaggtactattacgctccctactttgcagatgaagacacaaaggcaaggagtagctaagaaacttgctgttaagtggcagaaacaagatttgaactcacatggtaggctctagagccctcatcctttatccctctgctgtgttgcctcttatataagtcgaatactctacttacacgagaaaatgaagtgctctccatttgaataagctccgtgaagttaaaaattcccataagggcattgctaacaattcccataagaacaggaaaacaattcaatttcttggtattacacgcaacagaaaatctgtaatccttgaaaaaaagtacacaaatataagttataaattcttatagtaaatatatttattgtatactttgtatattaccagagtggaattagaatgagaaggagactattaatttttctttgacacttctgccttctttgaattggtacaagaatgcattatttttgtaattcaagtgacttgttttgtaaatgaaatggattaacatttactaacatgaaaagatgtcaaatatttatattttatgtgacaaagaaagtttcaagcctcctctaatatgatgccaatttagaaaacatacttaagtttcctatagttctaagtattaggacgtggcaaaaaaaacaaaaaaaaaccaaaaaaaaacagtgcatagaagcaaacataccttctggtcaccagacactatgatggctccattgtaggagggatcatctgagccatttctgtttctaaagtcatctatttccaaaactatatcctgacacttcagtgaatgcacgaggtcttcaatatttgatcctaacatagtggaaggaaggcaacaagaaaaaaaaaaaaaaagcaagaaaatcaaagtcaaagcttaaaataataatgattgccaatcgtgttaagaaaaacccagaatagcttagtaaagagccttgctctttaggagtacaatactattcattctgatgctaccacattaagttccatttactatcttcaatgtgacggactcctttattcttttcagaaatatattcatttatcttataattctcaccaggtgaaaagagtttatgaaaataagattgcatttctcacaggaagaaaatttgctaggagtgacttttataaactttaccagaaccctgtaatatttgtaattatgaataatacatacaaaatatacctcatgacccaggcttgttctagtgatcctgtcaaccttaaatggcactaaccttgccatgatatttaaagtactagtaacccattcaaaacatctttatggaattaagttaacttgatatttgccattgtgcccattatttttcttgacttgatttccatcatagatggaaaggaagtcaagttggtcacagggagaagtcaagctatgatgcagcctccacatctgaatcaaccacccccgcaccaagggagctctggatttaaaaggacccatcagggagagaatccacagatcctttgaaagaggcggcttgcagctgcaggctccatgagacagctgaaaaactgagtgccctcggtgtgaaagggcaatgtgtgtccccaaacacacatcctcactggggaatccgaaggttgagatcacgggaggattttaccttacctggagctaagacgaatttagaaagccaagcgaaatataggggtagaggaagcagtgggaggaaccctgtgggcactctcagcccccagggaagccatttttgactttgtctcagaggggtccttggggagggctgccagtggaattggggaaagaccacaggaagaaggaaacttccagctgaactttgtaataattttaaccaaatgcatagtttcctggacagaatcttggggaaggaatgatcagggagtgcagattcaagcacagaagccatggcagggggaaggcacataaccggagagccctgcttgctttctcaaagggagtcttgtagcatggggtgagttctcagtcctgctcaccagctgcctggaaacaaactcagttctgttgtaggggcattgagaccactttgcgggctgtgtgggaactgaatgaggcctgtcactgccggctttcccctacttccctagcgacctgtacgatgcagcagaagcagccataatctccctgggaacataactccatcggccatgccccacaggagctgctgcaagccctgtccaagtacagtctaagctcagacgtgcctaaccctgccctcacctgctggtctttctccacccgccctggtaaacataatctcttggaagttctatggccctgacccaccacctgagaaacctgaatacttatccaggcgaccctagggcaagcttgcatcctccctatactaccatagctgatgctctcttgaaagtgccacctccaggctggaggctgaccaacactgttccagcacactaaacaaaactacaaccaaggaccctcacagagtccacttcactcccctgctacctccaccagaacaggtgctggtacccacggctgcgagacctgaagatggatcaaaaaataatagatgttggcatggatgtgatgaaaagggaacacttttacactgttggtgggaatataaactagtaaaaccactatggaaaacagtgtggagattccttaaagaactaaaagtaagtctaccgattgatccagcaattccactcctgggcatctactcagaggaaaagaagtcatatgaaaaagatacttgcacacacatttatagcagcacagttcacaattgtgaaaatatggaaccagcccaagtgcccatccatcaacaagtggattaaaaaagttatatatatatgtatatgtgtgtgtgtgtgtgtgtgtgtatatatatacacacacacacatacatatatataactttttaaatacacacacacacacacacacacacacacacaccttggaatactactaatccataaaacgaaatgaagtaatgacatttgtagcaacctggatggagttggagaccatcattctaagtgaaggtaactcaggaatggaaaaccaaacatcatatgttatcacttataagtgggagctaagctatgaaggtgcaaaggcataagaatgatacaatggattttgaggacttgggaaagggtgggacggggttgagggataaaagactacacattgagtgtagtgtacactgctcaggtgatgagtccaccaaaatctcagaaatcaccattaaagaacttatacatgtaaccaaacaccacctgttttccacaaacctattgaaataaagataatacaaaataaaaaatattaaaaaagaaaattaacccatcagtttccttcatttgaaaatggagcaagctggatagacaccatttttgttttcaattgtctctcaggtatgtgctttctaaagatctttgataataaaaactcacactaaatttcagccccatttctcacctgtattattaacgattaacaggctggtaagaggcgtcttcgggatttgttccagagaaaggaaatacatactgggtgaaaactcccaacaatgagtttcacgagttactttatacattatcttctctagaatgatggggataaaagcaattccaagtactagtaacctaagtaaaacaaaattataacatgagtctgaagcaattttcctctggttatttaagtcacaaagatgctatataagtgctaactatggaaagtccacatgcatatgtggtgtttagttagataaaatgaaacatacagtgacagtaatctgaaaatcagcacaaaaaaattacatactttgtatcacattggaagatattcaagggtaacagagcatcaagagaaaaggtggaatccaggggcaatcctctgcaggtatgctggtttaccaggaaaacacaggaaatgattttatgagataacaggggccacaaattgcctgcttgggtacttttgatgagaaagaagccctattttacactgcagcctcaagcttgctatgtgcacaattgcaagtaaaattttaactttcttcaattgttagtttacaaatattttaattttcaggaaactaaatgcaatatttaaaacactatttttatatcctagaagtcatcccaccaactcaaattgcaagtgaaatgcttccaagcaatctttgtttctctaataagccatgagtccactctgcaatgactactttcccatcagacttcatactctacctccttctccctatcagccatatatttcatagaaaaaaaaaatggagtctataggacagaaactccttcatcttatcgccgccaaaagaaaagaaaacacatacacagattcagtcatcctctcattcttttattctgttgaagtagataatagatctttgctcctaacaaaaagatcagtccttgtcaacattgcgatgaatccaaactctccaccctccgtctatctctcattcattataaaatcaactttcttcccgacttcacattgccttttagcttctgctctttctactccgctccacagtcaagcaccgcaaaagagttgtctactttcagaccttctcttgctaaaacctttaataacttcccttttgccaaatccaatggatgctttgtttctcaactgttattaaccctccatattttctaatcttggcttaaacgtaacaatttcagtaagaccaacaccagcaaacctatttagaattgtaatgtacctccaactcctgtcatccctccctatccccttttctactctagtttgtataacctggcatataagttatttagttttatattcagtatttttcatcttttccacccaaccagatgtaaacaccattagagtagggatctgtgccttttgtgttcactaatataaccaaagctcctagaacaatgcctagtatactataacaggcttcaataaagatttgtgatataatggaacaagtttaaaggccttatcaattttgttcactacagtagtaaaactgtgccccaaagagttaaagaaatcaatgactagcagaaattattgagtttgtagggtgtcagattgaaagaagaaaaaaaaaagaaacaatttgctgaaacactgaaactccctcagcttgtaagataataaaactggctgaaatcagctgaaaccaatatggccaattacagtcggtccagaatcatcctgccgacttcacagcctgaatttccaccatatatttcataccaactgcgcttgaatttgcacaagggatacatgaggaggcatgaagagatatctgtacatgcctgaggactttccagacctctccttttcttctaccatgctaatcccaggacccaccccctaaacctttgctaataaaattactgccttaaagtcagcacagggagacagatttgagctggtctcctgtctccttgtgagtcaactagcaataaaaaccttttctttcctcaaaaatccagtgtcacagtattggcttctagcacatgaggcagtcaggcccttttcctcagtaacagcaggataggtaaacatacaaaaaaactgttaaatgaatgaataaattaatatatttactttcttaatatttgaatgttttttcatatactgaccaaatagatataaagtaatctgatactcacaaacacaaaagagctctcctttcacgccttaactttaagaagcgaagtgttgccactgcatagatttgtcgtctccagagagctgcactactgacagcctttcttgtttcaggaagagaacaaagaacctgttccatttcagactcatctccagtatttcttgtcacatgtattttctcttgtttcccaatgtcaaaatctacaatcatgtaataaaacattttaataggctatgttatctgaactttctctttaaaaactttgaaaatgatgttagactatttgaaacagcacttccaacaagttaagctactgatatccataatcaaaatttacgttaaaaatctttccttcaaacatatgtaatggattcagttccaatgagacagtaaattaatttttgaggatgattaaggcttcctaacaagcatttattctttcataccaataacagtagctcttcactaatggatacttttgcagagcaagttttatgcagaagcacaaagacaaatttatgtagctgagtttccaacaggcctcctctgtcatctggaatttcccctacaggattagttcaacactgatgattgacatctcagtaacgagttcaagacattgtgctttcaaatgatggaaagttcatggaaaggcctcctgtttgagtcccacatataccacacatttactgtataattttggctaatcacacaacttcaaatatcagttttctcatgggcagcttgatgttattatgggaatttaaaacaatataattcaaggactgagtacaatggctggtatctagtagcctcctaaattcttttttttctttccaatttttatttttggtgcaggcttgctacatgggtaaactgtgtgtcatttaggtgcaggcttgttacatgagtaaattgcgtgtcatggggatttgggggtttggtgtacagacaattttgtcatccaggtaatcagcataatacccactaggtcatttttcaattctcatcctccacacttaagtaggccctggtgtctgttgttctcttctttgtattcgtgtgtattcaatgtttacttctcacttgtaagtgagaacatatggtatttggttttctgttcctgtgttaatttctttaggataatggcttccagcttactccatgttgctgcaaaggacatgatctcattctttatggttgcgtggtattacatagtgtacatgtaacaccttttctttatccagtccaccactgatgggcatctaggttgattccatgtctctgctattgtgcatagtgctgcaatgaacgtatctgtatatgtctttatgacagaatgatttatatacctttggctatatactcagtaatgggattgctgggtcaaatgatagttctatttaaagttctttgagaaatctctagactgctttctgcagtggctgaactaatttacattcccaccaacagggcataatcattcccttttctccacaacctcatcagcatctgttatttttttactttttaataatagctattttgactggtgtgagatggtatctcgtggttttgatctgcatttccctattcattcatgatacagagcatttttgatatgcttgttgattgcatgtatgtattcttttgagaagtatctgttcatgtcctttgtccattttttaatggggttgtttttggcttactgatttaagctccttatagattctggatattatacctttgttgggtgcatagtttgcaaatattttctcccattctgtatgttgtctgtttactctgttgatagtttcttttgctgtgcagatgctctttagtttaattaggtctcacttgtcaatttttctttttgttacaattgcttttggagtcttcatcatgaagtctttgccaggaccaatgtccagaatggtattttgtaggttttcttctcaggtttttatagtcttaggttttacatttaagtatttaatccatcttgagtttatttttgtatagggtgaaaggtagggctctagtttcaatcttctgcctgtggctagccagttatcccagcaccatttattgaatagggagtcatttccccattgtttgttttcactggctttgttgaagatcagatgactgtaggtttgtggctttattgctgggttctctaacttgttccgttggtctatgtatagtagcctcctaaattcttctaatttttattacaaagtaaactaaggaaataacatcttattttattacttcttattaatacattaattagaattagtttattagctaattaagagcacatttttataaggaatggcaagtaagaggcaatagcagaattcatcgctatagcagagagcttttgataataaggaagaagtggtcattgcaaagagatgtgcctgtcactgacatgggaagcagacagatgttggaaagcaatttgcctagcaccaaggctgattatactcgatataaaatgattataatactggacaatgctagtattttctatctagtggacaatgctattttctatctaatgcatattataggtagaaatccacataaaaatctacaaatatgaattagaacatcatctttttctcttctcttttttttcttaattttctgctagacacacatttttatacctggttcatcaattgctgattttccttctaggttcaagaatacttcattcagagatgtcactgaaacagcataattccttatgccctggtcagaacacttatcaaggtcactgtaaagatctaaaaagccaatagtaataagtcaacgcaattaaaattatcaatgagtatattaaaatactaatttctaaatattactcaaaatagatgtctacaaatgttttcatattaaagcaatcacaataatccaaggaaaccttttctgtaagatattctcttgtcattcaaatcagttttaatattttacatttccattttgtttcataaactttaaaattcttgtatcattattgctgtgtgtgtttgtataagcatgtatctgtatgtctatctaaaaatttattaagttataccttatcctttgtattttctaacttttctatactaaccattttatatatataataaaattattataattttcaaagactctattgaactgcttacatatattttaaaagataaagtctcatttcatctgtatttctaacagaaactgctatttcagaaaagagatatttcaaagtttaattttgacaaagagtgcaaatcggggtttctatattcatggaaattttagttgctataatacgtccctggtaacatagatcatcatattggaaataggaacagattacttatgaataaatattttcatttgtataagctttagaactcgattcatagaacaacagaaaatgcagtcagcacaatcgtgaacacttacatatattctatgtgattacacagtaagttacctggaaatttgttcgttttttccaaaggcaaactatatacaagtttttcttcactttctgttgttaacttggcatcaggaatgtgctgcttaataagggatgtgattttttctgtgtcacacatttcattcctgtgtaaactattatttcaaaagagccataagtctcttgaattcttttccaacaccaccactcatgaaaagatagttttctattaaacagcttatatgtattacaggcatattctacttaactctagtaattggttcctgcaaatcagatactccacttcaaattgctaattcaacttcaaagtgctaattggtagcctattttgcattatttcaaatggaaaaattatagtacatatcaacaccaattcctttaaatgtaactaaagcacagtgacattttagcatacatacacacatacacaaacacacatacacacatgcaaatacatgtgtataaaagttattttatgtgtgtgtatatatacatatataaaactatcattattgtgctacatgtgtgatatacataaaaaacaatcatgataggatataagatacatgaaacattgcttctgaataactggaaaattcataaggtttttaataaacagttgctttctatgcattaagtggtttctcttaatgtcaacaacttctatttgcagagcttgtttgtgagtatttgatgctttctaaaatgttcccatgtgatattctgccattctatcaattagatttggaatataactacagaaatttaggccaaattgttttgctaaaagtaaacaatggcttattgaggacataaagataatttttttctatacaaatattggcttaaaaatgtcgtataggccgggcgcggtggctcatgcctgtaatcccagcactttgggaggccaaggcaggcagatcacgaggtcaggagatcgaggccatcctggccaacatggtgaaaccccatctctactaaaaatacaaaaaattagctgggcatggtggcgcatgcctgtaatcccagctattcgggaggctgaggcaggagaatcgctttaaccagggagttggaggttgcagccactgcactccagcctggcaacagagcgagactgtgtcttcaaaaaaacaaacaaacaaacaaacaaacaaaaaagttgtattaagaagtatactttgttttttaattagcatgcttaaaaccaagagataaccaagaaaggaaatgttaatgaggaagacattttgagctgtttattgcaaaacagtttctaccagaagttaagttgcctttcttatatttctaaaggcttctacaaaatgtcaccctcatattaatatgctcatttaaaaataactacacctagaatacataccttaaatgatatccaataccccactttcgcttcagaaacaaagatgatcctgcacatttcaacttcccattagacagaaatactttcctatctgagtagaaaggaagattcaaaaaattatgtgaagagtaattccttatatggtatattctctactttggatactaaaacactgaatgaaatttgtaatatcaatacaactgtaatatcattaagcccctgggtgcagtatcatttctaatccccatgcctattgtgaaacaggcctcagaaattcactgcattccccatagctaatccagtgcctcaaaactttccaaggatggcctgattcttcacctcttcctttgtccacatactttgccatgtaactttgcagggttacaccccatgtgacctgttgtagccaatggcatgtggaggcttgaaatgggcttctgcaaataaactgcaaacaagattttcttcttttgaaaacaggctatgaaaaataactctcatgttaaatccttaaataactagttggaataaagaagccaagaatcaccagccaagatgtcagcctcatccatgaattgggtactgaagaggataagtcggtctactttatgctccttcaggaggctccacactcggtgtcttgaaaagggatccaatccagcagttggttcatctagcagcaaaacctacagaggaggaaacgtatgaaagcatcttcctcttcacagtgaggatcttcagaaagcaccatgaaaacaagtatgatttctagactcaaatacagtcctccaccagatccctaacaagcttgcatggtactttattataaattttccctcacatttggtaattacagtagaagttggactttaataatagttgtatatccttcaatctaaattaattgtaaaaatatattttttctctcacctgaggatctcctaagatggcaatccctagtgttagttttctcttctgcccaccacttaattttttagcaataatgtcttgaatgctttgcatgtctaattccattataattctttttacctatcaaagaaaactctgtgttaacaatatcaaatattttactttaaggagtttttactctctaaaaatgaaaaggatttagtctagaacttcgttgattaagctttacctatcaaagagtagagtaatagctgaacaaaaaaaatatatagtcaaaagtaaattatttccaaagccatcaatcttaatgtgttcctgtacctcttgttccacttcctttggctgaatcccttttattttagcaaataccctgaggttttctctcacagtgaggaagtcaaattgaaaattgaactgtggacaaaatccaatattctttctaatttcttccatgtcagttatttcagagagttgagtattataaatagtggctgatcctataaatagaaatttaaaaggctttactgccagaatgttaattctatgcagagtgataatatatgttagtatttagattttgttcaaaaaacttgtttttattaaagaaacttcacattttccaattgcataattaatacattgaataattcagattactgttaacgtaaatatctgtgtccacagcaatgcaaaatatacatggaatgtcaaataatagtggaatagagatacaaatgttttcatgaatttatgtgcatatgaaatcaatatttcctgctctaaattattcaactgtgtaacaagtccaatttagagaaacattttttacataatcaaaccaatttacaacttgctttttcagccaacttactttataaaactgttttctcaccttctgtagaaacagacaatccactaagaatgtttagcagtgttgatttaccagctccattatgcccaagtattgcagtgatctgtccttcatatatgtcaaaaaatatgcctgttttagaataaaaagtggaaattagattttggattatatgcagatggaatggaccttaaaattggaaaagtaaaatatatctcagcatttcatttcattggtattttaatacatcccctataaaattatacatttaattgtataagttatgtattcctgaagacaaagcttcaatttggagaaattggatcaagactgggaatataaatttctaccctcttgcttccttcaaatcctttgaatgtcaaagaatctatacacttaatattaaataataaaacaaagactactagaaataaaaacaaaacgtagtttatttgcttcctaggcaaaggaaagaagtgtggcttaagaaattgtctccctgaggcttgcagagctggaaacagaagggctgggtatagagaaaaggggaagagtttatttcatattcggagggaggtagaactgataaagaaaacattggtaaagtatctcctggtactggtcatcattttgctttatatcacaaaagtgtgggcatgatatttagaaatatctgctgggatctaagacatgtcacaggcattttcacatatatgtgcctaaggcttgacaactttttctttaatgtttgaaaacttaactccaccggaaaataagaattcagttagcatgctggaaattttaaaagattctctgaagacagaaaacagagggaattagattgtcagagcgtcaaaaatcaggcaaaccacaggccaaaatagacgatgaagagttctatgaaagtaaaaccagtttcactaatacttcgagcttagtttgataaagtcaggtcaaagattataaaccggtataaacagtgtattcctattgttgaaaaaatattttatatataaatgtatatatacaaaaaagataatatattattggtaattatccctcatggcagaaacatattttaatttttttgttttctctttattctctaattttccacaataatgatattttcacatcacagaaatgtttttgtgttttaatttgaagcattatcaaacaatgaagtttttcttttttttttttttttttagtatttattgatcattcttgggtgtttctcagagagggggatttggcagggtcataggacaatagtggagggaaggtcagcagataaacatgtgaacaagggtctccggctttcctaggcagaggaccctgcggtcttccgcagtgtttgtgtccctgggtacttgagattagggagtggtgatgactcttaaggagcatgctgccttcaagcatctgtttaacaaagcacatcttgcaccgcccttaatccatttaaccctgagtggacacagcacatgtttcagagagcaaggggttgggggtaaggccatagattaaccgcatcccaaggcagaagaatttttcttagtacagaacaaaatggagtctcccatgtctacttctttctacacagacacagcaacaatctgatttctctttcctttccccacacttccccctcttccactggacaaaaccgccatcatcatcatggcccgttctcaatgagctgctgggtacacctcccagagcgggtggcggctgggcagaggggccccccacctcccagacggggcggctgccgggcgggggctgccccccacctccctcccggactgggcggctggccgggcaggggctgccccccacctcctggagggggcggctgccgggcggagatgctcctcacttcccagacggggtggctgccgggcagaggggctcctcacttctcagacggggcggccgggcagagacgctcctcatctcccagacagggtggcggtcgggcagagacactcctcagttcccagacggggtcgcggccgggcaggggcgctcctcacatcccagatgatgggcggcggggcagaggcgctccccacatctcagacgatgggcggcggggcagagacgctcctcacttcctagacgggatggtagccgggaagaggcgctcctcacttcccagactgggaggccgggcagaggggctcctcacatcccagacgatgggcagccaggcagagacgctcctcgcttcccagatggggtggcggccgggcagaggctgcaatctcggcactttgggaggccaaggcaggcggctgggaggtggaggttgtagcgagccaagatcacgccactgcactccagcctgggcaacactgagcactgagtgagcgagactccgtctgcaatcccagcacctcgcgaggctgaggctagcagatcactcgcggttaggagctggagaccagcccggccaacacggcaaaaccccgtctccaccaaaaaaatacgaaaaccagtcaggcgtggcagcacgcgcctgcaatcccaggcactcggcaggcactcggcaggagaatcaggcagggaggttgcagtgagccgagatggcggcactacagtccagcctccgcttggcatcagagggagaccgtggacagagggagggggagggggagagggagagggagagggagagggagtttttctttttaccttgcaatgcttctacttttccagtctttccattatattcttttataacatttctgattctgaaagaagatgaagtaattttcatgtaaatgcattttctagtattaataacacagattacagttcataactaagcctgaacttcacagtaaagggtatcactctcagtgggatgtaaggagggcagtaataaaagccctcccctgaccactcccaaaagagatttacacagacctgctaatactcttatcaaacttggcatttcatatattccagctatttctctaagttatcaaataaataagggaaagctaaaattgaaaaaaaaaagaaggaaagaaggaagggagcgaaagaaaaaagggagagaggctttccctcaatcctgaatccctctcaatcattatctttcacaggcaaatttgtcaaaataataatctttactccctatttccattgctttatcccacatttatttcccaacctaagacaacatagcttctcactatactactccacaaaaaactattcccaatgaaattcaccaatgaccattctagttaccaaatctaatgaacactttttagtccttatttgatatacttcatcactgttttaaactattactcactcttttgttttcttaagtctctaactccctggcttctacactttggttccacatcttcctcttactattccgttttggcgtactttatggactccttaaattggattttatacttggccaactatttttcttattctcaaacctttgccatacaatcttacccactctcatggcttcaactcctacctaaattctaatgattcccaaatttgtgttttagagatttcttcaaagtttcagatattctgctttttactatatatctacacttggatatcaaactgaacgcattatattttcctctaaactggcccacttccattctctatctcagttagaatttctactatctacccaggaactcaagctaagagcctgagaggcatccttaactctctctctctccctttttcaccccatcctgtgacctacaaaattattacaatttaacttcaagaatttatgaatttaactttataaatctatttgaatttatctctttactacttttcttgtgccttcttgcccaggctcttgtcatctttcacctcaaccagggctatgacctctgtgctttatttttaattgtcccttgtctatcagcaacagtctctttccttctgcaatgcggaggacatatcagagactacatttcacggaaccctcttttcagtatcagattttgctaatgagaagaacttgggcaagatttggagagcagaaatgaagcaaggtcattattctcgggtcacgtgagccaagcatatacgcaggctcgaggtttgcagcagcttctcagacttcttgacaaggactgctttgctactgcagattgagataactggtgagagatttcccagaaaatccctgacatttgcagcagtatactgacaaacttcttgaaaaacacccatttctgtgcatcaggctaaggtcctcagtggctatttcctgactttctggttgtaacttaaccttctctcctctaactcttgtacatttgtgaatccctaatccctgtattaaactcctttactcccacaatatttccagcaactcacttttcctgaccagacctagactggtaaaatatcgtaaatatttccatttctccagttgtgtcaccctcaaatccattcttcataaagctgccaaagtgatctatcaaagttctggttacctaatttgcctccttaaaatcattcagtgattccccacactatacaggatagcctaatctccttaccttggcaagcaaaatcttccatgatcagatttggtgcctacctcttaaagttaacctctctcttttcttgtactttaaggtcagaaatgttagttccttgtgttccctatacatacacactgtgtcttgctctactaggtggcttatgccatatcccctgtgtggaaggaccttcacataccccaccatactttatatgaccaagacctttctctttcataagactcaccttaagagtcacctccttttgactttccccactacactacactaggttggatgatccttctttatttcttttaattctctgtgttcagctctactacttatcagttatctattttagtatctatttccttagactctgtacttcctgaggttaaagactatcattaatctctgtatcctaattctagcagagggactgattaatgatgaataagttaaaaaagtaattaatttgtcaataggaacagtctggtccagaatgatcaaagagttcctggtttcaggcatgttaggccacttcctataggatgttccctctatctctaggtacatatagagggaatatcaaggtggatgacactgtatgcaggtttagacaggctagaactgtcacaattatctgagagtacactcaattcatattaatgtcataagggcaaattagacccaagaccactgaataggatgactagcatcaaccacttaggagacctaaataaccgctcttcataccatacaacaacacccatctccattgttcactggattaatatggatcaaactcatgatcctgggcatttattgaaccatgtcctaaaagacgagctttcggcctgacaaaagaggaaataatataatttagtcctaatttaatttgttatgtgcaacaatactaaattttctgttgtcaacgtaatttctataagaattaataccaaagaaagtgataaactatagctacagaatagctataaaagttttcatgcaggagataggacttgaaagactactaaaaattatagaatttgagaaatttcctcaactccagggaatagagaactttcaccttgatcttttcatattaggttatagtattctccttttcctgttgtctccttcctcatttcccactgctcccagataatttcaccaatcaccttttacgtatctgtttcaaaataacgtgaactgagataggtctaactgatttagtatatttgggatattcctaacagctaatatttattgaacacctagcaataggccatgtaaaagctttacatgtgatagctcattgactctttatgacaaattgtgtattattgttatgctcatttttaagatgaagaaactgaggcataggaggttaatactttagctgaaattaataaggggcaaagccaggattcaaaccagttggtttaaacctacagactacatcataatcactatgatctactgtctcctgaaaatatacttttaaaaagataacttcacacaaatagaatgtcacttaagaatactgcccaaaaatcttgaataaaataagtaaatacctagggaagtatgcactaaattatagaggaatgttttactgatggctctccctgctttatttcttatttgtttactttcagtcaatcaaaccagtttgaatatacaactaacatttatgcagtttctattatgtaacaggcatatatgcttaattatcttatggattatttatattattaaagatgaaagagaggcattctattctatttatttatttacttctgagacagggtctgggtctgtcgcccaggctggagtgcaagtggcgccatactggctcactgcaaactccacctcttgggctcaagccatcctcccacgtcagcctccccagtagctgggactacaggcatgcaccaccatgcctggctaatttttgtattttttgtaaagacagggtttcaccatgttgctcaggctggtctcaaactcctgagctcaagtgatctgcccatctgagcctacaaaagtactgggattacaggtgtgagcccctgcacctggccatatattcttagaaatgaatgaaaaagctgcttagctagatcatatagtttaactgaaagtcacaaagctattaaattgtgaagagaccttttgacttcaaaatttcagtccctatactccctatgggaagatagtctaagtttgaaaaacgtgtataatatatacttatatactgcatatgtatacatatacataacatagccatgtgtgtgttagaagacaaagcagagagggagtataagtagtgggagatgataatatggaagacagaagatgagaggcaagaaaatgataggtctcttaaattttactgttgatagtatcaacagtattcactttgaaaatggtgaatgagaggaatttaggatgatggcagagaaataataaaaagaaaagaacacataatctatatcaacatttgacctgcagcttcatttactaagcttttacctataagtgtacatagtcatgtaatttcttagttaccttatggcttcttttccatggaattctggagacaccggttcaaaagaatcatcagaggaatgctcaggatttatttcattctcaaagatttcatgatgagtattttgatgtttggaccaaaatgaggacttaaggaaaaataatggagaatccccatggccatctttatctaattaattaagatacaattacatattgcatcaattataccacaccaataaaaagggacatctgtcctttacttgatatcaattttgaacttaagttatttatcttgggcatttatatttataatttttttttttgagacagtcacgctctgttgcccaggcaggagtgcaatggcacgatcctggctcaccgcaacctccgcctcccaggttcaagcgatctctcctgcctcagcttcccaagtagctattacaggcacctgccaccacgcccggctaacttttgtatttttattagagacagggtttcaccatgctggccaggctggtctcgaactcccaacctcaggcgatccgcccacctcggcctcccaaagtgctgggattacaggcgtgagccaccgtgcccggctataatgttaaaaataaagcattacaggtgcattaaagttaagacagtgctgtggctttcgataagttatcagctatgattgacaaaaataaaagagctcatgaaagggaatacagttctagctgtagggaatcatatcaaacatcaagaacttcactttttggatttccagacatttggatgctaaaaaaagggatgtgtaagctgatcctgccatagcatatgaagatatattattttgataatatagaaaaaaacaaatattgaaaatagtgagtatataattcactgtaaaataaaagagaacttttttccaagtcctaagaatacaacaaaagcacaaaaatgaacatattaagaatgttaaggtagacgtaaggctggacaactgttgtcaaataggaaaaggacatagaaaggaagaaaattaaaattaaaggatcagatgtaggaagcatgggaaatttttttaattcattagaaaaattaaataagcacagattaaattgtttctgccacaagtcttctcatgttttattttatataaatttttttcaaccaaatacatagataattctttaacgttttatgatctggaattatacagggatctttatcaagagatagttcatttcattctcaggtagaaggggctctatgtataatcaattaaaaatggcttgacagttaaatggacatatctattagagtagagaatacaagtgcagatctaaagaaggaaagaaaataaatgagatggtgttttaatgatatatccacaaaataggaatttattggtggtaagaggaggaaatttaaaagatttttcagaaactgtaggataattaaaacaatacagaattttcacatgtaatatttcactgcaagctgttactgaaagctaatataatgtagggggatggagctgagcaaaagaagagctaaggaagaagagacacaacatataaacttcttgatgtatgaaagcaaaagatgttgatgacatgtagaaaaatatatgggaaagaatggaaaagttatagatagaaattctttgacaagagaaatgtaaatagtattgcagttttagagatattatgtgggagagaagaaatgttcaaagatgaaaatatgtaaacagatctagagttgaactagccaaaaagagaaattacactatgaaaaaacaaagaaaaaattttagaaggggaaacaaattaaaattcaaaaatgaattcattttattcatagaaattatagtatttttaaaaacatatcaaaaatcaaactaatgttttatattcttgttttgctactactgtagttattgcctgtcctggtcagtgcctcacccctagtagccaaagccggaaaccagtgagccatcctcatctcttttccctctcacttcccccaacttctacataattaaccaccaaatcaaatttctatttcctaagaacctcgtgaatctgttctcccctctgcattacaatgacatcttaatttgatcctctcaaacagattagtatccacctgctttgagcccattcttcatgcagctgccagagagagcttcctaaaaggcaaatctcaccagtgaaagagcctacatacactactacttcagtctgtctccattttttgcaccagtcgttctaatgcttttggattttttgtacaaacgatagttcaagaaacaaatatgttgtgttaaggatagtttaaaagcctatctgctatgctataaccatcactgcaaaaataaaatgatatttttactacaaaatacagatagagaaaagctatgatctcacaatagagaagacaatttcaaattgaagaattaaggtatataaataaatttcacattctttctcttatctgacaaggtgaaaattttgtcacagatcatcaccaatacttgagttgcccaagaggacacaatccaaaattctgtacattccctatcaagtgaaaattatcaccaggcacctatagaggggcttaattggagacaagcctcagaatctcagggatctttacatgctatattgtcctgtgccatgtacatttggaaaaatctcccggtaattattgtaaactggttaataatttctacatcacagactcctactatgcaccagctctgccaaacaatttttaatttcccttatgatatactatttcacgttgctgggcatacatgctggtgactatatggctggataactgttgtcaaataggaaaggatatagaaaggaagaaaattaaaatgtgttgctgggcatacatgctgttgacaatatggctgtggacaaaatgtgttttcaagactctttaagatgatttgtttttaagactcttctccacaagataaacttacctatcctctaaatgcaatttgaggtgtttcctccatgccttttctaatttgacaaccctagaacttaccctctcatggaaccttgtggtatcctcttattatacttcttacactacatttaactaccaatttacataagtatttccaatgctaactgcaaaagccttgaagactcagactgtttaacccatcataggcttcaataagcagttacattttaaatggataagtagattaaacctgatgtctaattggtacagataccattagcaattcttggcttgttttggttcagtaaaagaattataagtgtaaaaacatttacatataatctggtctaaaaataaagatttgaaagatgcttataaaaatttagattgaccaggcacagtggctcacacctgaaatcccagcactttgggagaccaagacagctaaatggcttgaggccaggagtttgagaccagcctggataacatggcaaaaccccgtatctacaaaattaccaaaattagctgggtgtggtggtgtatgctggtagttccagctactggggaggctgaggtgggaggattgcttgagtctgggaggcagaggttgcagtgagctgagattgtaccactgcactccagcctgggtgacacagtgagaccctgtctcaaaaaaataaataaataaattagatttaaaaatacgtattatacccaaataaaggtaagtgaaatttaatcaaatgtaaggactttaaaaaagaattttaatttgaagctgagagagaaaaagagttcattcttgccttacttcatcaaatatttattgagagcctcctatacacaacgtagcctctagatggaaaaacacactttgttcatcctgaataaagttcaaatggaaaggcacatatatgcatttatttaatttgctgggaatttattgagcatctactaggtgccaaacactgttgtgatgcatcagtgtcataaaaagcaaatatctcttcccttgtggggatctacattctagggaaacaaaacagaataaacaataaaatattcaattctattaatatttaaaaagaaagagcattaggtcagagtttcaaagttctagtccaaattctgctaagtgtgttcttggccagtcatgcaacttctctagatcactgttttggcacctctaagatgtgtgttctggactaaataatgaactaaaagctgattattaaaattatagattatacaaacaggaattgaaaagaaaaagtcaaattcaattttcccaggtttaaagattacttgtgcttctgggcagtggggctgggggaatattggaaaagaaaaacaagatgactatgaataagtgaaggacttaaagaaacatgaaaatgttgcctattaaaagctaattaaagtctagagatgaggaatttgtgttaccatattaattatcaaaaagctctcagttcgatgtaaaacttgtaattctaatcacaacagaagatcatgaagcggaaatggtaaaagcacaaatgtaatatccctagaattaccataagtctggagtttctatctttatagctaactgttataattgagcttcatagtagacagaatttgagcatacaatgtctgtgaacaaagaacattattgttcttattaaagcttaaaaacccatcatcatgttgtagaaacttacattaaatttaggacctccagaaattaggtagatacaaatgacacagaaaatgtgattctagaataatacttttcttttaaacaatatattctatgtaaaatttgtcccccgacatgatcagaggtatcatttaaaggaaaaaaatgaagttggtacagcagacatcaataaggtgtggaataggacttcccagcacttgttccccagcagaaacattaacttgaaatgactatctacactcaaaaataccttcacaagcgctaaggaaaccagctgacagagtacagcacctgagtgtagtagatcagaagcaagaaaagatgcattgaagagggcagaaaggacagttttacaatacctgtgccaccccttcccaacctgtcaggcagcacagcatgaaaagagatactcaccacttgaggaaatgagagattgtttcctgtctgtgcaaaagcattttagtttgatgtagactctgtctcacaccatatacaaattggtcccaacttgcaaagcttcaacttatgatttttcaacttttcaatagatttattgggatgaaatgccatcataagttgaggaacatctgtacaaaaatcaactcaaaatggagtaaagacttaaaagtaaaacctgaaactgtaaaactactagaaggaaacgggggagaggggagcttcatgacactggtttgggcaatgatttttttggataggaccccagaagcatgagcaacaaaacaaaagtagacacatgggattacatcaaactaaaaagcttttgcacagccaggaaaggaatcaacagagtaattagaaaatatttgcaaatgatacatctgataagaggttaatatacaaaatatacagcaaactcaatagtaagaaaaaataacccaatttgaaaacgagcaaaggacctaaataaacatttctgaaaaggagacataaaaatggccaagaagaatatgaaaaagtactcaacatcactaatcatcagggaaatgcaaattaaaaccataacgtgatagcacctcacatctcttgcaagggatgctatcgaaaagatgaaaggtaaaaagtgttggcaacgatgtggagaaaagggaagccttgccactgttggtgaaaatgtaaattagtacaaccattatgaaaaatatgatgaaggttcccaaaaaggtaaaaatagaactaccacatgattgagcaattacacttctggtatacatcctaagggaaggaagccattacactgaagagatatctgcactcccatattcgttgtagcattattcacaatagtcaagatatgaaaacaacaaacccagtgtccatcaatggataaatggataaagaaattgtgagatagatatatatatatatacaatagaatactatttagcttgtaaaaaaaggaaggaaattttgtcatttgtgacaacatgcatgaacctggagatacattatgttaagtaaagtaagccagatacagaaatataaataccatatgatctcatttatatgtagaatctaaaaagtggaacaaactgaaataaagaatagaatcttggctaccagggcctggcagtgggtggagagagagcagggattggagaggttgggaagatgtttgttagtcaaaggatacaaagttttagttagataggaggaataaactcaagagacccattgtacaacatgttgactacagctaataacaacgtattttgaaaattgctaagagagtagattttaagtgttctcactacaaagaataagtatatgaggtaatggatatgttaattagctagatttgactaagttcacaatgtatactatttcaaaacatcatgtgtacatggtaaatatatcaagtttttggcaattaaattatttttaaaaaggttttgtggtcaataaagtatagagacagtgaattactaattaaattttataagaatgtattaggaggccaggcgcggtggctcacgcctgtaatcccagcactttgggaggctgaggtgggcagatcaagaggtcaggacttcaagaccatcctggctaacacggtgaaagcccatctctactaaaaatacaaaaaaattagctgggcgtggtggcaggtgcctgtagtcctagctattcgggaggctgaggcaggagaatggcgtgaacccgggatgtggagcttgcagcgaccaagatcgcgccactgcactccagtctgaggggacagggcgagactctgtctcaaaaaaaaaaaaaaaaaaaaaaaagaatgtattaggaaaaaaattatgtttactacagaaaaccaaaaatttagtatggcacagaattacaaaacagaaaaaatttaactttggcaatatacaacttatttcttcctctacccactacaaaaaattctcattttgtctgctaggttcctgggctttgggggctaaagaaaattaatttgatttatattataaaggataacgaatgatggacaaaggataaaacaagagattccaaaaggaagaaagcaatgagaaagtagagtagagcctaaaccaattagttgaaggacacttttaagaatttagatgccaggcacagtggctcacatttgtaatcccagcactttaggtggccaaggtgggaggatcccttgaggccaggagtttgagaccagcctgggcaacgtagcaagaccccacctctacaaaaaaatttttaaaaaaattagtctggtgtggtggcacatgtctgtggtcccagctacagaggaggctgaggtgggaggatagcttgaacctaggaggtcaaggctgcagtgagctatgatggcaccactccacttcagcctgggtagcagggagaccctatcttcaaaacaaataaaaagaatttaaagaacagggtgtttttaatgctcttgccatatgtataagtgacagaatgagtgcatacagaagtagacaaggtttgggatttcaagttccattttgcctgtttgaaaaataacattaaagtaattttttaaattatcaaatatgagagtgctttcactgtgatctgtaacaagttagggcaacatgttaagataattttatgtgggttatgtatgctacatgctgctctttagtcaaaagaagaaactttatctaattagagaattcaattcatttcttcacaggaataatttttcaaagtaattttgaagccaatttgccacatacataagaaattactcatatgaacatgttacatcacgaaattggaaaactgtattatttgccagtaagaagcatagggactaaactgtaaacgatagtacaataaagattaagcaaatataaaataagtctagaagaaagctataaatatttttcaaataaaatacctgaattagaaatcagatgaacatactaaaataagtagggtttgaaaataacagtaatagtcagattctgacatgtaagaaattatgtgtgaggaaaacatagattttttatggagctaaataagtacagtcacgtgtcactgaacaatggggataccttctgagaatgtgtcattttgtcattgtgcactctacaaacctaatgatatagtctactacgcacctaggctatgtggtagcccatggctcctagactacaaacctgtacagcatgttactgtactctatactgtaggaaattgtaagacaatggtatctctatcttatcatatctaaacatagaaaaggtacagtaaaaatatgggattatgatcttctgtgaccactgtggtgtctgtagtccatcattgacaaaaacattgttatgcagcacatgactgtacattaggttttaggattatatgtgcacacactatctacaaattttatagtcatttaaaagccatctgtagagcttatgctattactttattattattattattattattatttcaatagttttgagggaacaggtgatgtttggttacatgggtaaattatttagtggttatttcttttttttttttttttttttttttttttttgagacggagtctcgctctgtcgcccaggccggactgcggactgcagtggcgcaatctcggctcactgcaagctccgcttcccgggttcacgccattctcctgcctcagcctcccgagtagctgggactacaggcgcccgccaccgcgcccggctaattttttgtatttttagtagagacggggtttcaccttgttagccaggatggtctcgatctcctgacctcatgatccactcgcctcggcctcccaaagtgctgggattacaggcgtgagccaccgcgcccggcctttagtggttatttctgagattttggtgtacacatcacctgagcagtatacactgcatccaatgtgtagtcttttatccttcaacccctcatccttccctccaagtccccaaagttcattattcacatgcttttgcatcctcatagcttagctcccacttataagcaagagcatatgatgtttcgttttccattcctgagttaacttcacttagaataatggtctctgactccatccaggttgctgcaaatgccattatttcattccttcttatggatgagtagtatttcattatatatatgtatatatatacaatggcatatatatacatatatatatatgccacatatttatgccacatatatatatatatatatgccatatttcctttacccactcattgattgatgggcatttgggctggtcccatatttttgcaataccactttactcctgcaaaattgccataatttaaaaaatcaaaaaagaatagatgttggcacagatgtcgtgagaagggaacacatttacactgctcgtgggaatgtaaacttgtacaaccactatggaaaacagtacggagattccttaaagagctaaaagtggaactaccctttgatccagcaatcctactactagttatccacccagaggaaaagaaatcactacatgaaaaagacacttgcatatgaatgtttattgcagcacaatttgcaattgcaaaaatagggaaccagctttaaataatgccattatttcattcctttttaatggctgagtagtatcctatggtatatatatatcatatatatacatcatatatatgatatatatatatatatatatatatatatatatatatatatatatatacacacacaccacattttctttatccactcgttggttgatagcatctaatgttcatcagagatattggtgtgtagttttctttttttgttatgccctttcctggttttggtattagggtgatcctggcttcatagaatgatttagggaggattccctctttctctatcttttgaaatagtgtcaataggataggtatcaattcttctttgagtgtctgacagaattcagctatgaatccatctgttcctggactctttgggggcgggggggaatattttaattaccatttcaatctcactgcttgttattggtctgttcagggtttctatttcttcctggtttattctagaagggttgcatatttccaggaatttatccatctcctctaggttttctagtttttgcacataaaggtgtccatagtggccctgaatgatcttttgtacttctgtgttatcagttgtaatatctctcatttcattccaaattgagcatatttggatcttctctcttttcttggtgaatcttgctaatggtctatcaattttgttcaacttttcaaagaaccagctttttgtttcatttattttttgtattttttgtttcaatttcatttagttctgctctgatcttggggatttcttttcttctgctgggtttgggtttggtttgtttttgtttctccagttccttgaggtgtgaccttagattgtctatttgtgctctttcagactttttgatgtaggtattttatgccatgaactttctttttagcactgctttttctgtatcgcaggggttttgataagttgtgtcactattatcattaggttgaaagaatttttaaatttccatttttatttcattgttgaccgaacaatcattcaggagcaggttatttaatttctgtgtgtttgcatggttctgagggctccttttggagttgattttcaattttgttccactgtggtctgagacagtgcttgatataatgttgatttattgagacttgttttgttgcttatcatatggtctatcttggagaatgttccatgtgctgatgaacagaatgtatattctgcagttgttgggtagaatattctgtaaatatttgttaagttcagggtatactttaagaccattgtttctttgttaactttctatcttgatgacctgttcagtgctgtcagtggagtatcgaagtcccccactattatcgtgttgccatttatctcatttcttaggtctagtagtaattgcttttataaatttgagagctccagtattaggtgcacacagatttaggactgtgacattttcctgttggactagtccttttattattatataatgtccctctttgtctttttaactgttgttgctttaaagtctttttgtctgatataagaatagctactcctgtgtccatttgcatggaatatctattcccacccctttaccttaagtttatgtgagtccttatgtgttgggtgagtctcttgaagacagcagatacttggttggtgaatttttattcattctgctattctgtatcttttaagtggcacatttaggccatttacattcaatgtgggtattgagatgtgaggtactatgctattcatcatgctggttttctagaatgctggttatgctagcagtgaagttgccacgtggacagactcaggacctctggttagccagggtgttgcaagtggtagaattatctgttgttttctccttctttggtgcaggattgttctgttatgactttgtgtaatggcttgagttcattggcctccaaccaggaggtggaactttcaagacagcaccagctgctgtagcgccctacagtggccaggataagtactctggtttctcaggctatgggtggggccatagagctcccaagagtttgtgtcttttgtctttagctaccagcggtggggagaataaaaacaatcaggtgggggcagggttaggcatgtctgagctcagactttccttgggtggggcttgctgtgaccactgtgggcgacaggtttgcgggtggggggagggtcgttctcagaccaacggtgttatgttcccaggggaattatggctacttctgctgcatcatacagatagccaggaaagtgggggaaagccaggagtgacaggcctcacccagctcccacacagtcagcaaggccagtctcactcccactgtgcccccacaacagcactgagtttatattcaggcatccagtgagcaaggctgagatcttgccccaggctataagcctccctgctgagaaagcaagcagggctctcgggcctggctgggccctccccatctgcccacacctttggctgttgcttctgcgctagtacctacatttcctgttcaaccccctaaccaacccccaccctggccccttccgattctgctcaggaaaattcatgctcaaagttattacaaaattcagctaggagcttccttcactctgtggcccctcccctattttattacctttaataacattatagaaagcattcttattgggctgatgtttcgacaaaagggagagaataagaaataatccattaacttcatattgtgtttccttcttcatatttttgagattcggaagaacaactatacttgagccaaatattaacaagaaccaattaatgaactattttacataagtgagttcaatttaggcactaaaaagcatcattattcaataggtgatttaagtgttttcctccctctctcaaactaaaacacataccgacacacatacatcctacctttacgaaagacaaaaaccaaaataaatacagttctttttaattaaaatgatttttaaaaatgattcagttcggccgggcgcggtggctcacgcctgtaatcccagcactttgggaggccgaggcgggcggatcacgaggtcaggagatcgagaccatcccggctaaaacggtgaaaccccgtctctactaaaaatacaaaaaattagctgggcgtagtggcgggcgcctgtagtcccagctacttgggaggctgaggcaggagaatggcgtgaacccgggaggcggagcttgcagtgagccgagatcccgccactgcactccagcctgggcgacagagcgagactccgtctcaaaaaaaaaaaaaatgattcagttcatacctttaaatagtaaaatggaaatgaggaaattctattgttttgaaattttttcttctctactatcagaaatgcttcttaagttacaaataaacagatattaatacatgttttaagaaacagaattgctttaaatttaactttaaccacactattaacttaccaggtaaaactcgctcaaaatataatgtgaatatcaaatagaaaagagtatcaaatgccaaaatgaaaaaagtggctatcattttgtatgaatccccagagggatcaggaaaaataacaccacttaagtaattatccaggtgtgtaatctgagatttaaaagaaaaaataaaatgttagatgaacttataaaactaaataaaacaattttttttaaaaaatagtggtacctagagatatgtaattaatattttaataccttttcaaatatgcatagtaaatgtgctattagtattgttgctttttaaaaaatgtaagtattctcacaaaattttaaaatgctatatatgaaagtaaaacaaaaaagagaaattaactgcatcattaatcatgggtattttaacaaagaaaatatggagaagtggacaagcaaccaaatataacatactttgggaaggaaaacttgaagtgggcaacataattagagcccatttaaagaaacataaaaattctaagtataagatattgcagaaacattcaattattaaataagtactgaagacttgaagaaaaaactagaaagataataatgataacagttaacatttagatagtatgtatctggctctgtactagtgctatatgtatataatagcacaattaatcctaaaaatttacccccatgaggtgggttctactgacatcctcattctgcagaagacaggctaaagagattaagtgacttgcccagtgtcaccagctggtaggcaacagagatgagacccttatccatgccatctggcttcactcgttattcataacctcacattttactgcctctttaaagggggacacaaaccagatatttctcagtggtcagataatgggcaattatttttcttctttaaatttgctaggattttacaaatgatctgcctgctttgtttatccatttgataaaacttttttgttgttcttatttagtttctcaacagcagaatttcttaaaacacagagtggctgattattaaatttcatgaggcaccaaattcttgaataagaacatattttgaaaatctaataataaaatcttgaaataattatgttcttacctgggccattccagcagtgaaggcaaaagggctaagaagacttaatacccatcccaaagataaaggaagttgtctatataacacagtgaatcccagacatccccaaaatacagtgaagagaaatccagccaaaccagcgagcataggtttccttattaaaacactcatgaggaaagccaatgctatctgaaggaagaaagaggtctgattggtatatttttccttgaagattcataaatagcaatattcatcgatttctcacattgtcaaaaattttctcaaaacatatagaaaataggatagaaaatatagtgattacactaatatcccaaagaaacattatttgctcatgtatctgtaatctgaaacaggttaagaggtaatatgcttttaccaactcaccaaagaaaggccatataagctatagagtgtgaatatcaccatgaagccagtatgaaatacaattgggattgatgttatgaccagagccataaaaatggacataatgaagatgaagcaaatgtatgtcaatccccaggagagcctatagtagaaacaaggtgttagttcaactgtcacaaacataaatgtttggagaggtaatgtgcgaaatggttaagagtaaaagctctgaaatcaggactaaatttattctaaatgggtggccatacacattttgtgactattagcaagttatttatcttctctcactctcatctgtaaaatggagtttttcatggtagctattcatatggttgttctgagaaataaatgagataatgcttttgaagatgttagtttagcatgtggcacagaaagtagccattactataattacctctatagctgtagaacaaattttatatttaatataattaaatatacttttattctttcagttaaatgactatataaaatgtcagtggaaaaacaacgacaatctcccctttaaacttccttatactaaagctttctaaggtataccattcttctgaatgtttaacagaaatctttccaatttaagtaaagctcatttcattttttatccttgtatggctatggacattagacaatgtattatttttaagaatcagaataccatagtgctattaagaaatgtgaaactaaaataaaaggaaaggtattatgatgccaggcacggtggctcacgcctgtaatcccagcactttgggaggttgaggcaggtggattgcctgagtcaggagttcgagaacagcctggccaacatagtaaaaccccatctctactaaaaatacaaaaaattagctgggtgaggtggcgggcacctgtaatcccaactactagggaggctgaggcaggagaatcacttgaaccccagaagtggaggttgcagtgagacaagatcgtgccattgcactccagcctgggcaacaagagcgaaactccatctcaaaaaaagaaaaaaaaaaaaggtatcatgatgattatagttgtataactgtgattgaatgtcggagtagccaaaacattgttgcttttgaaaatctctggaagtagatggaaaggtatgttttaaacaaccaccacatgatccagcaaatataccactgagcatttttcccagaaaaattaaaacttatgctcacacaaaaacctgtatatgaatgttaatcacagctttattcataaatgccaaaaactagaaacaacccatatctcctccaaaggctgaagaattaaacaaacagaaatacatccatgccatggaatagtactcaacaataagaaaaaacaagctattgataaatgagaatttggcatacttgagccttatttgggcaaagcagtacaatctactgagttaagtagtaaatttgtgcctgatcagatagaaagtagaagggataatatacaagaagtgtgagggctttacaagaaatatagcagttttaccttaatacttgggatacttgcatttggcaatgggttcttataaaaatttaaagaccaaaattcacaaagctatatatttttaagaaaattatatcattttattatttaaaaatctattttccttgtctttgaaaagaggagaaagagcttgtctaagacaccctccccaataacagatgcaacatatcaattaataaaaaaattatatccaacacaaaatctgctatcttgtacccttgtatggttttatatcagggaagaatcattcagaaatttagattaaatgtttgaggtaatggatattccaattgttctgatttgatcattacacactgtatacatgtatcaagataccacatgtaccccacagtatatacaactatgatgcatcagttaaaaatagcaaaaaaaggaaaaacaaacctgaatccaaacttagtatttacctaccgtaaagctaataatatggtatgcatttctgtaggccagtttcacaaaaggctttttctatctccttttcccccttgtcattaaatttattttattaatatttttgagttttgtagcacagtctctaaaagagtgctgttttcttaggtttgatttctggctttattgtttataagttataggttttagggaaaaatcttaacttttctctgctttatttttcttacctgtaaaatgtggataatagttctgtcatccctagaacacggtaaagtacttaaacaatgttcattattatttctataattattagactataatacctcattattattaaatatttattactataattgtatactatctcaaagtctaggggaaaagggacaatacttaaaggaatggatgaatgcatagatatatatataaatgcatagactatatagatggagagcatagatatatatataaatgcatagactatatagatggagagagatgtcttttaccatgcactaacaaacaccgaacactgtttgtgctgtgtgatttaaacatattgcctcatttaatcctgataccgtttgatgaattccaaccaaataacatttttacagactatgtgaccgggcctcagtgacactgtggtaaattcctttattgcccaaaattatttgaacttttttctgctcctcactgttatgaaaagcagcataatttcccatgtcactaaatgtgaggttgtcactttgactagctttgacctcatggtgggcagaacacacttcttcccctcttgactttagttctgtccatgtgacttactttaatgagattttattatatatgatgtgagcaggagcttgaaatgtgcttgtgcagagagacttgcccccttgtgtttctgtgattgaatgagaagaccatggccagctagcctactggcccaagaaggaagtgagtcacaggaagaacacctggatctaacctgtaccttgaatccaagcctggccaagcccagactagatctgccaaagtccacccatactgcagacaaatgagaaagaataaataattgctgcttgaggtcgtggggtttggggtggtttttatgcggcatttttcgggcaatatgtaatgatcacatatttttcttcaactcagggaaacataagcacaatccttacttactttctactgcaagcatcttaaactctaatgcaagtaaggtgattaaattgaatacgtgcaagaaaacttgtgagtgcgtccaattttttaagaacctagttagtttctctaataattaatgtatgatatacagtaaagtagcaacttaacttaccagaatgctgactctcggagacccatcactgtcatcagtttcttaaattttcctctttcccttgcaacatttaatgatgcaaagtatataaaagaagagaaagaaactaagcaagtaaaatgaaaccattcattcataatttctcccttagaaatgaaaggtggtatcttcatatttattccaataactgatgtcaactcctccattacagaatgatttgttgtgacctaaattgggacattagcaaatttattatgtgaactatagacaaaatatattagaaaactatacactttttattttcgatttcaatatttacatattctcatcattttaaagtatgaactattaatatcagaacaatcttaataacttttgataccaattgacattaattataagagtcatttgagaaattactgaaggtctgtcatgcataatatactgtgctacgtaatggggaaacagcagcaattcaaacagaaacactcttcattctcatagagatttacattttgtagcgcagcagaagaaaggagagatattaaataaatcattgcataataaattgtttagttacaattgagcaactatgttcaaagaaaagtgtaggaaaatcaagaaaggcttccctaaagaagtgacatttttactgagtgttgaaggctgtgatctttcctaaacaaagattgggggagggggggtggttgaggatggagaagaaaactgtgagcagagtaaacagtatatgaaaaggaaagaaggtgtatagtgcgttggagcacagaaaagaggttcctgccacaaaaacaaataaatagactgtagataaggctgaagaaataaaccactcccatagtttaggcaagatatgataaagatgtgcccttgtgcaggtggcagaactgaagtacatagatttgagcttagaaataagaggccaggtaaaagattggatgtgatgagtgagacagagaaaattttctctgataatccccagttccttttactcagctaggtggttttagcattcactgagatagggaaaattttataagactcagtcacatttacagaaaaacatccatgttcatttttgcgcatactaagtttgaattgcttgagacatcaaagtagaggtatccagcacacagtcagatacatggagctagagcagacgtctagctcttttagtccctagctcctttagaggtcagcaaactttagttcccagaccaaatctgacccaccacctgtttttgtatataacattttattgaacacaggcacactcatttgtttgtgttatctacagcggctttcatactacaacagcagaggtgaacagttacaacacatttggcccccagagcctaaaatatttactgtgtggtcctttacagaaaaatgttgctagtctacaagttagagttcttggagtcatcagcatataaattataatgagaagtacgggaataaatgagaccatctagagaaaacatatgggatagaaagagatgcctgagatagaactttgtggaactacagatagaaagatgtaggagtgtaaggggagataagttggcaagaagactgagagggaaaggctagaaatggagaagggaaatcaggtgaatctatgttatttagttgaaatatcaagtaaggtgaggaataaagaagctgttaattgacatggaagttgttatttaccttagaaaaagcccttttgatggtgtggtagggatagataatattgagttgagttgagtcaaaggaggacaaccctttcaagaaacttagccattaatagaaggaagttagggtagttgtgtgaagaggaaagtggataaaggaaggtcttgaccataagtgaagaaattaattttaaatcctgaagagaagaatctagcagaaaggcagagattgaaaagaggagacaaaaacaaaagtccatagttgaactttgctgatgaagttgggagggatgggatccagaccatgaactgaggaaagacattagggatgaagaaagagaatgtgtgtagggggtcataggtctgtagttttacagggtttatgttagaagttgggagatattcccatgtgacagcttttgttttctctgaggatgacaggcaaagtatcacctcctaagagtgtaagagtaaggtaggggatgaggcagatatttaaaaagagggaagaatacagatttaaaatatagctttgaagttaggcacttacttctataattgcagcattaattgcagcttgaaaagctacaaacccttttagccagtactttgccaagtaacaaaaaatttcaccatgcatggcccaacagtgttctttaaggaagaagaaaaacatgtccatagttatataatggagtcaactcctggaattaaaactttaactttggctcaaaaatcaaaatatctaaatgttagctcaaagcctatgattatatgatatagaggatttttaaagtactctacagaattggagaaaaaaagaacatatgatggcaggggcagtggctcatgcctgtaatcccaccactttgggaggccgaggcgggtggatcatttgaggtcaggagttcgagaccagcctgaccaacatggtgaaaccccatctctactaaaaatacaaaaaaattagcctgtagtcccagctactttggaggcttaggcaggagaatcactggatctcgggaggcagcggttccagtgagccaagatcgcgccactgcactccagccagggtgacagagggagactccatctcaaaaaaaaaaaaaaggacatatgagtagttgccaaaataatgagactcatcctaagttaaagactgatgattaagttcagagggaaatgtatattaattctttacttggttgtattaatattcctatcagtcattccaaacaggggattccatgaagtatcaaaaaaaaattataatcagtttttttatagttacctgtgtattcagagtgctcctttataactgggattctatatccccaattaaacttcaggcgatatgagaaagtatcactaaatataactcccaccatttcatggtatttttttggaagttctatatccatggtctcttcatctggtgtcccaatgactgttcttcctaccatgtatgaaaaacataaataaataatcatgtaaacttattactagaggacacaaaaacaaaatacagttgcttgttttatataaaattagtggtattatatattatttctggatagctgcctcttagtaaaaggctgagtgaaactattgttttaagttcaatgcaaatacatgaaaagacacaaaggacacattgtcttttaaaaatctgcagcatattgcttttagtgtgatctcattttggtaaagaaaactgaatttatgtgcctatgtaagcatagaaacatactctatatatgaccatgtgcatatttgccttgaaggatatacacaatttgaatgaggggtaggggaggagagggggtaggggaggagaggaagtagtggtgaagatgaaaggaaaagctctcatatttttgcttcatacaagtttgtactattcaactttttttaaagtagatattactttagtgactaaaataatttaagaattaaaaggaaaaatatttaaagtaagcaatacaaatactcagaatttggtgttttctctttttctgccaagattataaactgatatcacatgaaaatagtacactagaggtaaattgtatacaaaaaatcagagtacaaaaataaaaaatatagtctacctacagattctctgaggtcaagaacactctctaagaattaagtgtatagtaatcagtgcataaatgaatgagtttacaatctgcaggagtaatccacccactaagtgtttaatagatctattactaacagaagctttgaaaatcactggtccaattagtgcctcctttttcacgtttatgtattatgttctaaaaattttattaactttgtatctcactcagggtgaaatctacattaagatgaaaaagctgtttattttatgctgtagccatacctttcaaaactcctcatccttcccaatatagagtcaggcggtgaaacttttatgaggacagtgctaacatcactgattttctctaggggtataaaaaatactgtcaaggccaaaccatgaatatttatgctaaaaagcaagagttagataaatgtagaataagacagtgagagaggagctgtggttggaacaggcgagcatggtagctggaatgagatattttatataagaaagagacagagtccagtggtccgtgagactaagacagaaagtggctattagcttacactgtgcatacaggaagaatagtccctgaggcttcagtaaatgcttcatgagttcagaaaaaatgaggtaaatgactacacaaaggaagtgaatagagacagatcagggcagaatcaacactgtggtcaggcagaacatgtaaacaatgcaagtaagggaggcccaccaaagtcaaagctccagaaactgcaatgaagaattacaaaacagggtaaagcagccagggataacaatacccattcgaaagcttggataggttaggcacagaatattagcaactcacataaaataattaaaattcagagtttggaggtgtcccttggcatggcaatccagacaccaaaaaactaaataaaagtttcagaaagacaagaaaaagcagtgattagagctgagacgttaacagattggataaaatgtacaaaaggatgaaatggccaatgttcagaaccctggcagaatgagggctaacaacaagagaaatttgatagtaggctaagattgctgaagaaaagaacattttatcctgatactttccctatgcaggagcaaaggcctctatggagagtccagagaccacagctgaccaccaatagttactcctaatggcagtagagatataaaggatggtaggcaaaggtctcacatagtaagtaggactctcaggtgttcttatttctttatgagatgcatacatcaaattaatgcagcatcctacataacatagagacatctattttctgagtccagatatgcagaaaaagtcttatgggaaaaaaaaaaaaaaagcctcactactctaagatcaagggctgtgaatttgttgactttcagtagccaatacctgatttgattttaaataattttaaatgccctgagctgtacattttaactatttttatacaccaaacagtaatgctttttcaacaccattgctaagcttgagtttgaatttcaaacacctttgatttataattcctatatactgggaactatatttatttcaatctcaattgaaaataattaaatccttaaaattttttgaaactctttaaattatagaataccaacccaaatataaagttttttaagttaagttttggaaaagtgaaatttgtatcatctaaaatgggtccaatctttttttcctactgcaacaatatgttctagtataaagggcaaacggtatgcatatcattaaaaacaaacaaacaaacaaaagtaaatcatttcatctgttgcccacctacccttagcttcacaccaacccctgtactgcatatataatgagaatctttgcctcagttgagaatcactgacacacaggctaggtaagtaaattcaacctgcaaaaagaacttgaaaattaagtcacataatactgaaacattggttattggacaacacacctttcataaaggaagccaaggccatcttattcattatcctttgtgttatgttactgactggtgtatatgccactaccaggccagagtcattaaactgatccacgcttcccaggactttaggaggttgttcaggaaaacgggtagctctgaagtgttccgaaaagatgcacaaatatagccctagaaacaatgttattgtccattcctccagcacacaaaagagaaatgagccatgttataacgtggtccagaccagtgagaaacatccaaacacatttttaaggcagaatgtattgccattgagcatgacttcatttcagtctgtaatttttttctgcccaaattaatatctaccttttaaagaaaaaaacaccctttcaaaaatacacaacttttgagataatatcaacaattgcaatcaatcttaacccagtgatttagcacccctattagtgggactgccattgattttatgccctcatatttgaagcaacgtaagtatatggcatcacacagaagatactcttgccaaaaatatttaaccagaattggatcctgcttttagatccagctcactgcttacaaaaaatatagatgataaagggatgacttaaatgacagcatggagaggcaatcagataaaaagagaacatggaatattcaacaggataactagttttgtctcattggttcctgaacaaatcaaccttaaaagacattttgggggaaatttggaaaattgaatttggccatggaactagatgatatggaattatttttaattttgtgtagtgggatagtggtaatgtagggaaccaagttcttaattttttgagatactaaaatatttagccattacatatattttagggaagaagaggagacagagagatgaagcaaagatggcaagatgttaacagctgtcaaatctggatggtggatgtataggtgttcattgtaccaatattttcacatttctggattgacatactttttttaaattctagtgagtaataaatatagatgtatccttcttcaatatacgaagcaaaatatttgatcgaactgcttcggaagctattgcagaaatttaaaaggatgatataaatcctgttagctcccactgaaatggtactgactatttctgaacagactgcaatctctacatggtcaaggcagatccagttatatctcatagtaacacaaagcaatgtcttaatattcatgtcagcatacaagaaactcaacagaatgcaaaggtattgacaatctgtgatcttattccatgaaaccattctatgtttacaaaaagcacggctttgaagagattccaaaaaagtttgcagatttttactcatagatattttcccagccttaccaaataacatgacattaatcgaaatgtccccaaatagtatcagggtttgcccacgtaaaaatctattttattttgcctagcttatctttcccctggctgtccctgcccccaacacagaagttagctaagagtaaatcagaatgactctgagatttgaatgcattaattatgtggaaaatggctggttctattctgcaaaagattatttttcaggagctgtcagatgagctttttagttaatttcacatttgacacaaatattatcctattttgcaaaatatatatcgttttgcagtatttagaatctcaaatcaactagccagtatgataattaaaaatcagaatttataaacaagaaaagtaataaaaatggcataatactatatggtggattttcatttattaattatggatatatatatatatatatagtgaatcataccaataaactctctttttattctccattttttaagaaaattcttgtacagaagagcctgaatttgttgacgcacgcttatctcttttttaaccattttgtcctgttcattaacagggtaaagtaaatattgcagagcaatagctaggggaaaaaagaaaaaaaaaaagttcagttacagaaagcctttgaacattttgaaagcataattttcagatgtgccaactaaatgccttatatgacactgtagcaacatattcaatcaggattttaaaaaagaatataaagtattagtaattataaaatgtcttctcagttgttatttctctccaggcttttatggctatgagggagataaaggagatagtatataagacctttctccttttgtctcagaagtcactttttttccatgaaatcttaacattacatccacctaaagtaaatccctcaataagatcttagtaatttttagaatccaaaaaacactttctctttacttgttaagaaaaagaagtttaacaggaagaaaccactttgcagttccttgtcagtcagcaatttgaccacaagctgtcttattttgaattgcacatctgggcacatgtatttgatatcttgttaaccactgggcaaagcaaagtcgaaaacattacggccattcttagaatcccaaaaagctaattcctcttttttaaatctccatttatgaagtaaatatgtaagatacatacagattaaaaccaaaaatattggctaatatgactagagtaattgatttgtaataatgatccttattctttgttttcaatttgaaaatccagagctgatcatttggtgtcacaactatgactactgaagtccatttgaataaatgttgatattatatacaaattacaatgttcagagagaacttgctatatttcccctttttcataaaataaaaggcaaagccagcaaaacccaatataatctctaaattctaacttaagaaagtagaaacattaaaacaccaatcttcactttatggatacagaggtctacttaaacagctccataagcaaaccacaaaaacattttaaaagaacaaaagaacacagaaaaaaggaacttgccctaatgctcacacattctaaagaagtaaaaccatacaaattctcaaaaggatattcaaagcagtgtcagagagagaatttattgtctgataatatttatatacacctctgaatctagccatctttcatttatcacactaaaatgttacataagtttttaaaataaaataactcactagtactataacataaagcataaaataatttagagcatctgaataatataattttaaaaatttcaatcaatatgtttggctttggctatatactttatatctttaaaaccttatgcaaagtgaaaatgtaaaacaaattttaacttacagttaagaaaataagagagaagtatttgaagcacttggatccactggtctctttttgtccaagaaaacaatgaagaatccttcaaggactcctctacaaatggttgcctcttttaaaactgttttgattcagcttggcttctgaaaagccatggtctgtgtgtagaacatgccaacaaattctgttggttttttccctatgtttttctccttgtccagttactcttcagagagtgtaatgaattgttggctgagcgcatcattggtatttgtttattgctctttttggcatacacacaaaaaaagagatcaaattcaaaaagaaaaacccacatatttacaattgcatggataactacatatttacaattgcatgacttttaataattaaaaatttgacagccaagctaaaaaaggagcaaattaaagataaagttgaacagagagagagaaaatgaggattgctcatctcagaaatctgaatcattccaatgagaaagtttcatctgaaagttaactgcatttcagttaaatggttccttgtattcactaattcctatgtactagaaagtgttctaagggtttaaatgaattctcccatttgatactcaaagcaaacctacaaagttggtactctactcacatccattaaacaaatttgaaaggtggggctaacaggtgaagttatttgcagatgtttaaataagtgtgaagccaacagatgagtccagaatagtatctggactccaagatccctcactcttaactaccactatgaaaatggtgctaatcaagacaatgatatctgatacccatttaaaaagtgtagtggtatagactagatggcataactttaatgattttgttacttttttttcagctacaactaaattggatattctcagaatggcaaataatgcctctttatcaaccctgaaaatctttttatgtgattttaactataataatacacttcttggtatgcatacagaagctaatgcccattcatgaaagtgacagagacagaaagggtaaaggactcagagactcttcaaatgattaccattttcattaggaatatggaaataaatggttcctttaattgtaaatgtcactaacaacaaaggaagcatactttaattgctttcctttgttgttagtgacatttctcttcctattcaggcaaaatcattactagaagtaaaagttcatgaaatagaaaacatgaaacttaacctggttccgatcccagacattaatggtaatattcacttaaatgggtggggaaaacaattaaaatcatactataatacagacatacacccttcttaatcaccaaatttttaaaatattttttatttccataattgctgtgatttgaatgtctcctctaaaattcatgttaaaatttaattaccaatgaaacagcattgagaagtgtagcctttagaagtggtgattaggtcatgagggctccaccctcataaatggattaacactattatcttgggaatgggctcctgataaaaggatgagttaggcccaattctctctctctctgtctcatgcacatgcttccacctttcacctttccactgtgggatgaccctcaccagatatcagtgccatgctcttggacttctcggcttccagaactgtgagaaataagtttcttttctttataaattacccagtctgctgggtacaactaaatctgtggtgttctgttatagcaataaaaaacaagctaagacaataattttagggatttcaatctccaatacggtacagttgggagtctgagacctgcattgcagacttgtcactcattgtctgtgtcccttggagaggtcatataaaatcctcaggtctctgttacacatttataataggatttggacccttttcattcttagcctttacatatttataattatacagttctgctacagagtcagaatgttgaaatactccagatttaggcttatgcacatccacgttacataataccaactagcacctcctcatcaaactcttccttactcttgagtccttgacccctgaaagcacgatggctttcagcaggtaaatgtactatattaatgaacaatcagaggcaatttggcagaagttttcctccacatacctctatttcattctaatttcccagaggaaactcagccaattttttctaaactcaacaccactgcagaatccttcgatcaaattctattacctaatctaaaaatctagctctcttggttatctctttttattttattgttaatttctattacaatctcttctctccttccatctttctttacatatgactggcaattacatatgagaaaatattgtcactgccagctttcttaagctaccttatcttataaaatatcttataaactagctcatcttcttacattccctgcccaaatttccattgtattagtttcctagggctgccataacaaagtaccacaaactgggtaccttagaaattgatttgctcaaagtgtcagagtccggaagtccaaaaatcattgtcctatctgaaaagccatgctctctctcccagcttctggtgattgccagcaacccttgtcattccttgacttgcagatacgtaactctaatatctgtgttgtcattacgtggcattctctcttctatgtgcctgtgtcttcaaatggcattctcctgtgtatttgtctctttcattctactaattttgagttagtttgctcctgttattctagtttcttgagttgccatgttaggttatttgagatctttctacttttttgatgtaggcaagtattgctataaacttccctcttaaaactgcttttgctgtatccctttggttctagtatatcatgttccccctttttgactcaagaatgttctaaatattttcctttttaattgctccattgacccattagtggctcatgaggatgttgtttaatgtccgtgtatttgtaccatttccaatgttcctcctgttattgatttctagttttattccattgtggtcagaaaagctacttgatgtaattttgattcttttaaacttgatgagacttgttctgtggcctaacatatgacctttcctggagaatattccatgtgctgttgagaagaatgtgtattctgcagctgttggacagaatgttttataaatgtctgttatatccatctggtctaatatgtggtttaattataatgtttctttgggattttctgtctggatgatctgtctattccagttccttacaattatttattgcagtatatttgtccttttagatctatttatatttgctttatatatttcggtactcttatgttgagtacatatgtatttataattattatatcctgttgctgtactggcctctttatcattatataatggctttatctcattttaaagttttggttattttatcagatataagtatagctactcctactcttttttttgtttctatgtgcataaaatatctttttccatctcttcattttcaatctatgtgtctctttacaagtgtagtgagtcttttgtaggcagcagatagttgggtcttgttttttattcaatcagccactttatgtcttttgattgaagaatgtatttcatttatattcaagttaattattgatagatgagggcttactgctgccattttgatacctgttttctagttgttttgtggaccctttcttctcttacaatcttcctttgtgtgtaaatgattttctctagtagtgttttgatttcttgctttgtatttttaatatatctattataggtttttgctttgtggttaccgtaaggctgacaaaaaaacatctaacaagttattttaaaataacttaactttgatagcaaaggaaaaataaaaaaactgtacacttaattccattctcctcccacattttgaatttttgatgtcacaatttttaaattttacattttatattgcctatctcttagcaaataatttattatttttaatagttttgacttttattcttcatactaacgatataagtggtttatgctccacaattacagtattagaataacaatcatgttagcattcttctctttagattagaactcccttcagcatttcttataggacaggtctgatagtaatgaattcccctcagcttttgtgtgtctagtaaagtctttatctctccttcatttctgaaggacagctttgctggatacagtattcatggttggcagttttattttccttcagtactctgaatacatcatgttccactccatcctggcctgtaaggtttctgctggaaaagtctcttgtcaggtgtattggagtttccttatatgctatttgcttcttttatttctctattttcagggtcctctatttgtctttgaccttccaaagtttgattataatatatcttggggtattcttatttgggttgaatctgattgattagctgtgatcttccagttcctgtatatttatatctttctccaggtttggaaagtcctattattatttctttgaataaccttcacactgctttgtctttctcaactctctctttaactccaacaactggaatattttctcttttaatgttgttccatcaattccataagccttcttcactgtcttttcattcttttttttacctcctctgattatttccaaacagcctgtctttgagttccctaatgtttttattctatttgatcagttctgctcttgatggtctctatttcatttttcattatgctccctgtatttttcaactccggcatgtttgtggtttttttaattattatttcaatcttcattaaattatctgataaatttctgaattgtttttctgtatattcttgaagttcattgatcttccttaaaacagctattttacattttttgtctgaaagatcacaatccccatcactttagggccagtccctggtgcctcattttgtccagttggtaaggtcatattttcctaaatgttcttgatgcttgtggatgtgtgacaatgtctgcacattgacggattaggcatttattctagtttccccaatctggctttgtttatatccattcttcttcaggagatcttccacagactctaaggagactgactgttgtcttccctgagcccaagaccagtacagctgtctcagcattagagcattaaagggcatgctaagcccaggtttgctatgagtcttgggagagctctgagatttatgcagctttctagcccagatagacctggggaagaccaaagaagggtacccaggttgtatgaaaaatctggccagaaacctaaacccagaagactgttctggtagctaagatggatgtccatctcctacagtccctggacaggtgaggtagttcattgattgtagcaggtgaggccagggctgagactggggacccttggatctcctgcagaaggcagctggcaagcctatcttattggctcagatgagtgtgcatctcccagcaagtctctgcacagatgggctagttccctgactgcagaggggtcagaactgaggctggcttccctcaggatctattatgggacagaggctggagagcacaacatggaagttcagactcccaggatgcaagacatgggcgagtctcactctaggtccttgtgtgagcagttctgagctgggactttagcagagaagggctgaagtcaagtcacagggcaactttcagattcattgtcagcagtcagaggaggctctctgttgaggcactagtgtacatgattctttctggactccttggcagatggttttggttgtaggctcaagaccaaatgagtttttagccaagctccttggggaatggaaccatttccaggcttgaacccagaagcaaaatcagcagatcagccactagggtgctagtctgcactctcaaaacaacctctaggtcttgggatccactggggtttcacaatcttatacctgaatcctgaggctcctgcacagagactttggtctgtggtggtgcagaattattgttgttatggggggtggcgggtaatgagtgggttaccttctattatgtcatcttgctggcatcactctccccagttaattttgatgctgctggtcaatgaattttttgctctacaaaatttgcatagagcaatgaaacaatggcgttcacagagtaaaccttcaattaatcttaattaccatttttaatgcttagttcttatacgtcaagtctcttctaacaattggaattgttttacttcttaaatattccaaataaaatgccacttgttttttgctcatcttgatgctttctcccagtgggaattatcaattaaattcttaagtaatgatttgtttaaggaaaaaaattaactaatttttctgaaggatgtgactatcactggttttcccttttgaagcaaaagaaatgagaagtaaaaaattagatttgagactatggttacatctttatttaaaaagacgataaacaacaccatttctggaggtttcctttaaccatctctgcccatctccctccaagttatcccagttatcaataaaatttactttcaatattagagataactagattctgtgccatttggagagtgcctgaaacgtttcctattttgtggctcctcaaagagaccaaaggagggatttataaccggtgattacaatctaacttcaggttcttgtcctgtcctatctaagaaccattcctgtccttttcaacctctagctgttctgccttctttaagtttgttgaatggctaggagtatcctctggctcacccctcttactttgttctaacctcttgaactctattactgcctcaccatttctcaaatgaactagcacttgggtgactctggctcagaagagttctgctctggcttcttagttcattcagttctggcttcttagactgccttgctgtcactgccactactcaagcggccttaccccacccctttctgggaccagaaaggtatccctttggcacaagcctctgctgccatctggtggtcagagtttcactctttttctgtcccatttctactaggcacccacccacaccttgcattgtgctgcttccacctggcaggattagaaactgtatctctcatggttactgagatttaaaaaaaagaaaacaaaaaaaacaaaaacaaaaccttaattttaaagttagagatgcaatacttttaaataatcttgacactgtcacatttcagtgtaaaattcattgtcccccagcacagttacaactctgaatttaaattgtacattgtaaattcttttgagctttaactaggcaaaagaaaacttccagtggctttctatacaattcagttctcaacttttgtctcagttgtctgctgtataggttttgtatcctcagctgcatgggaataaccatgaggacaaagataagatcctgggtttgcatcttacaatacctatatatatatggccaagtcaaatagtagtaggattttttgaaaagattctttctttgaacttcaaaatgtaagcaaagctattcaaacttgtggatcggccacactgtctttataaacagtttatttttatccagggcacctacttctaatatttataatgcaggcttgtaaatcccccctgcccaaagtgagtagtcccaaattgggaaccccattgagaaatgacttaagaatagcaaataagtaacttcacatgtaagaagatagttcacataatattcaaagacaacctaagattaactgaaaacagcactgaaagaagacatgcattcaaatatgcacaaagaccttgagaataagtctgcagacagagtctatgaaactgatagaatgtatttattacaagattagaatcgaaattttctccctactacctcaatctgagtgaaccagaatcaagaatctacctcctttcagcactgagtatgaaacattacttgtgtatggaaaaactacagaaaataattaaaacaaacttttccactgacgcctttggataaatgaatcaattttcaacccaaatcaatgcattaaatcagtattttcaaatgggagtaattttgtcttcctccccctacccccaccccaaccctccctcaggaaatatttggcaaagtgtggagacatttttggtcttgggagagtgtgctactggcatctggtgggaagaggctaagaatgttacaaataccctgtaacacacaggacagtctctcacaacgaaaaattatccagcccaaaatgtcaatagtaccaaggttaagataccctgtattaaacaatagcaaatcacttcagtgcaaaataagtttcctaaggagaaatccagtatattttggatagtgaagaggaaatggcaaaagttattattttctggtcaaatattaatggcatgggattttgatatactccttctgtagcacaatgtctaaccaaggcttccaatatactagccacttcttactcatttaattcatgatgtcatcaatggagtcgacaagtcttacgttctatgaaatgaccagctgatccaggtctcttttggaatttattggcagagagaaagaaaaccctaaacgtagccttagggcagagcaaaatgtatacttttgtacattccagatcaatgcaaaatgtttctgattggaatggaaaatgggccatttgccaaatcagtggctgtataccacatgacagaagctcttcttaatcagctctggcaaagatagcacatctggttaatctactcaactgaagccaacagttggctgaatttgctctagactaatatcctcctctagaactggatttttgcaggaccaagattagtatatttaacacggaaatattataaagaccatccccctcccacttgcatctttaggtctttaagggtggcactaacttcttccattcctttcccattccctctcccaaaatgaaatgtttttatttcctatcttgactgcggctagtacagttttctcactgtaatttccccaaaattcatgtccttcctaaaagcctcagtaggtgactgtatttagaaaaaagatctttgcagatgtaaaaagacaaggtaatattggagtagggtgggccctaaattcaaaatgactggcaacctttgaagaagacacaagacattcacagggaagacagctatgtgacaagattggagataagcatctgcaagctaaggaacatgaagaatttccagcaactggccgggcacagtggctcacacctgtaatcctagcactttgggaggccaaggtgggtggattatgaggtcaggagtttgagaccagcctggccaatatggtgaaactctgtctctactaaaaaatacaaaaattagatgggcatggtggcaggcacctgtaatcccagctactcgggaggctgaggcaagagaatcgcttgaacccgggaggcagaggttgcagtgagctgagatcacgccattgcactccagcttgggcaacagagtgagactctgtcaaaaaaaaaaaaaaaaatttccagcaactaccagaagctagaaaagaggcatggaactgattctccctctgagtatccaaaaatgaaccaaccctgctgacatcttgattttagacttttggcctctagaactgtaagagaataagcttctgtttttttaagccactcaatttgtggtactatgttacagcagccctagaaaactagtatacacactatgatagttcttaccccataggtcaagaaaacaatgggggttatgccaactcccatgtatatctattccaattacaaatcagggactagagacatgacagataggtctacagactagtggattctctatgaactagctctaggctaggattttagttattatctagaactcaaatgcctcttactctgtcagagagggcatgatgatactttactttgagtctttggacttgtgtcaactttgaccctgtggtaaacaggccttaaaatgattgggcattctgttttctccagtatataattacctgagttaaaggctatagattactttggaggaggtctgaggaaaccaataccatatatcatttgcagggtccctcctcctagggacccaacttctctttcaattggttgtgggtacaaaaactggctcagatccagaaaccagagaggactcatgaccttctgttgaggcaattgtcttcaaccttctgatcacccatcattgatttaattgtaaagaatgagtactccattgatgatccattcatttggcccctacagatgcaatgttctattaaatatctccataactgtggatcactgtccccatcccccacagcctagctgttgtcaaagataacatggcctaaaaactaaagcagtgaaaacaaattttatttggtaactactgacagtaggggaaagagctgagctgccttctgatctgtacagaggtgattggggtgtttaaaaaggagagtgggagtagggaggttgtaggggctcagcagagtcagagaaatagaaaagtacaaagggttggtcagtgtgaatgtgattaggtcagctgtgtttcttagctggcaattatcagttaggattctatcctctcacagagactggaagacagaggccttatccttcttgataactatttttaaaaagaatggttcccaggtcgttggagaaagaaacatgtgagctgcaaaagatacatatttataattgtaagctccttttagtaaataaatgctctaagaaatcagatcaggggcctgttatcatgtgttggctacaacaaaaagtagatttttctggtagtattgagctttctcagactgttatttaaatgggggtagggacctgcgatcaccctacagacactgccttatgctgctagaggccgtgctaaaatttggtcaagtctctcagtgtcaggctttcgacagagttgttctgtgttgagagctctgcagttctttttacagtaattgtgtccccatggtttcttaggtttctaattgttgagtgctgccacccggcctctattagtcaggattttatcacccccattgctctctgtgagcccagtgttatcatggtatcacttaccatcagctcacaggacagccacctctagctgtatagtgacgttggcgtgcccttcaatagtaccttccttgttcgtttgaatttagtcatctactgtgttttccaaactcatatagtacacccacgcaggatgcctggttttctgggtgttttcacccttttcttgcatcatgtaccatggcttttcaatatttatacatgacattgggtgggcaattgctttttccatgcaggaagcatcttaacagtgtgttcttgctaagaaccatctcttgggattcttgccaggacattaaaaatcctttaggccagaagagtactctgaataaactcttatccaactttatgttctgcattgtttgatcatgcacccttaaaatccagtcccatgcacattctcctagctcttatgggtagatgtggctagctcctgcagctcttgtgtgatacagtacatttcttccctcagaaataccagcacaactttcgccaagttactttatgtcttaatccttgttattggccattaggaaggaagttaggagcagatcctggaatggggcttgtattagtttgctaaggctgccctagggagttgaaaagtgtgacccgtttgatggtagcactctcagaggcaggagaaataagttctttatttctgaaggggaatataggcagttcatttcagcatccacaggagcctgaacaatgggccattctatggtcccagaatagaggaaatggagggtttggagtggctaacctagtttccaaactaaagcactcttcggttggtacagtgaaatgcaatttctttagtaaatagtaccatgtggtgagattttggtggtctgtcttctgactgtgatattaacttgtttctgtagaactcttcagctgcctgacttctctacatcatcaagcctccaagggatgggccccttccaaagttgtcttcctctttcccagcagtgctttcccaagaaatcaatcacaaactcaatttcactttacaatttccttcttttcagttcttcagtagctaagatttgtgccactgggtctcaaatctgttctcagaatttccttactctgggtaagaccccttgccttctggcagtgtgcttcagttaacattacctatgtttcactactgctagggccttgctgtaccatcaataccccctgactctcagcttgtgaatgggttccaaaactaacactgctcccagtatttatttcctttgctcactggacatctccacttggatgtctaatgagcatctcaaacttaacaaatacaaaactgatctttccctcaaatcctcaaacctaaacttccacggtcttcttcatccacttgatgatactagtagaagatacgttcagagacataattgctgataattctactcttccagaggctcagacaaaacaaaaaacaaaaagcccttgtgtcattgactccctttctcccatactccatgtactataatctccaccttctcaatattcagaattagaccacttcttattcaccttcctgattcaactcaccatctcttgcctcatcaaatgcaatggcctcctaacaggtctcttgtgctctgtcccctcatatctgattattttcaacacagcagctaaactgttcctttcaaatatgcctaatgttgccacacctctactcaaaaccctccaatgacttctgatctcattgaatgtcaataaaatgtccataagggccctttcgatcccatcttccactagtgtcccccttaatcagttagctaaagcttcactggttctgtttctcaaatatgccactcacaccttgcctcagggcctttgtacttgcagtaccaactcaccttctcagtgtagtcttgcctacatgagatcagtgtgctttcatctgcagcaccaagagtccttatctccctccccatcatctaacatactatgtatttttttaaagtaggtaatttgtcttactataataaaagctcagtgagggcagagacttttgtctattgtttcaataatgtatatgcctagtgcttagaaaagtgcttgattcttaactgacatacaataaaatatttgtgaatactgaataataatgaaaagcagtctttctttgaaacttaaagactttaggcaccatcatagacggctctaaaaactatctagtgtcttaatttggtgaaggtaaattcaaaggatgcctacttactaaagaattagaagatacagataaggccttttaaaattagcagatatgataacactagaagctgagatttcttaccaatttgtaaagcttgatgtataattttaatctcattctatcacaaacttgatttcatgtacactgatgtatgagaatttaaatgtagtcaacagaaaaccaatatcaactacatcataatcacataacaatatcaatagtataatttggccaaagaaattactagccaatacatatacatcacaactagcactcaacatcttttcctacaactatatgacaaagatatgttaataaataaaaattagataaggtgaaccaaaacaataatggtattattctgtcagtaaaatgactatagtattatggttaattagacatataagaattacaaaacagaaaggaaagtaaaattgcaacccaggtgaggaattcattttctttctttctgtttttttcttgagacagagtctcgctctgccgcccaggctggagtgcagtggcgcgatcttggctcactgcaacctctgcctcctgggttcaagcaatcctcctgcctcagcctcccaactaactgggattacaggcacgtgccaccacacccagctaattttatatttttagtagagacagggtttcaccatgttggccagactggtctcgaactactgaccctcagcctcccaaagtgctgggattacaggtgtgggccactgcacccggtctgaggaattcattttcattaattaagcacgttatactatagtcacaacacagaagctggaaagtcctattatcatgaatttggatgaaacgtaataataaaacctaaaaaacatcttgttttagcggaaaatactgggttgcaaaaacctgaaacttagattgggttaactcacaacttaaagctcaaaaatcaaagtttgaacataaaagaagggccacctcaacagttgccagtttagtcttagaaggcagatccaggttctatgcttatatcattatttagtttagttgatagataccccttgatcagtcccaattgttaactgagaaacctaattagcatccatctcttggtctcaaattatcaaagggataaattttgatagtgtgagatagctcttttattggcaaatgtgtaactctgcaaaggtatatatgtagacacggtgaaaaaattacttctgattagtgtactgatactgtatttatttgagaatcttgcacacacatcacgtaacaacagggatatgttctgggaaatgcatcattaggcaattttgtcactgtgctaaggcaatagcctattacacatctaggctatatgatacagcctgttggtcctaggctacaaacctggacagcatgctactatacttaatactgtaggcaactgtaacacaatagtaaatatttgtgtacatagaaaaggtacaagaaaaatacagtattatattttatcatcttactatgtggcccatttttgaccaaaatgttgttatgcaacacattactatatttatgcaagtgtggctgcaagccttataaccaggaagttttgtgtattttgcctatttttacgatgcttgaaggccaggtacagtggttcacacctgtaattccgacactttgggaggccaaggcaggaggatcccttaagcccaggagtttgagaccagcctgggcaacatggcaaaaccccatctctacaaaaaatacgaaaattagctgagtgcagtggtgcatgcctgtagtaccagctactcaggaggctgaggtgggaggatcacctgagcctgggagcttgaggctgcagtgagccgggattgtgccactgtactccagcctaggcagcaaagtgagaccctatctcaaaaacgaaagaaacaccaaatgatgcttgaaattcttgagaacttgattttttaatttaaaacggtaatttaatttgcaagagttgtttaggcacttgggaagaatctgttcattaagtttaaaatattgcctaagtgtttgtatgaatcaattcattcaaaaattctaaggaaagtgataaatatgtaagtagtgttaaatatctgagagtaactgaacctgttatatgtgataatgtgtaagttaaagtgattgctttctatttacaaaaaaatacattcaagacaaaaagatctataaacatacctagtttatgtttaaaatctgaatgtaaattaaaacaaagtaattgtcaatgttccttctgcacttgaaaactagcctcagatacttaaaaaaaattactaacaattttagtgccaggtttttgcatcatttttaatatgagctactcattattcaattatcagcactaaataacaaagaattcacttcagtatacaaaatgacttgtcttaaattttcaactcttaaagcttattattaatataatcatatttatttttcttaaagagcagcattgagaattgcttacatatattataaataaaaaataattaaacttttacctgataagaatagctgatataaaaattattcatctgagaataaattctttcattttaggaaataagctatttcaggaaagaaaataaaaaatcaatgttagcaaattaaaaatacattaaggataaacatttctatttctcaaaaattaatgcctatttacatgttacacaaaaatacagtatggtattttaacaaactcagggcacaattagaatgaagttttgagtaactaacagaacaacaataaaaacaataataacaacacttatcctaagtaaaattaattgtgctcctataaaacgttgttagtactactagcaaaggatttgtcatattatagttagttatataaaataatagctagttatataagttatataagtaatatattatatatattttatgtaagttatataagtatctatcttacagatctccacgatcttacagggccaaaactgatagtcatccgagttctctccaaagaatccatttctggaaacataatcacttaaaatatttgttaaattacattactctaaaaatgttttaatgattaaaaccaaaatactgacctaagataatttgtgcaaatttaaaagaaaaaaattattttaaagaaaacccactgtctttactgaaaacaaactagaaaaaaaaattaagagcccacaaaagtaagatgtaaagtacactcatcatgttttttcttgccttattagtcagtaaacactcactcagtaaagctcagcttttactttcctttgaaaatttgaccatgaatgggaaatataaggttggtgatgttgcttttgcctaatatgtatatttatttatttatctgtactgacatagaaaaaagttttgagatcagtaatttaagacattttaaaattagtatgttcataaacatgaactgtacactgtaaataaatatatttcactttttgcctcctttgctttccagctcacttacccttgttttcctaagaattaagttatatttctcctgagtcagattttgttactgtgaaaaagggaacataatttaatttaacaaccaaaatatattctgagtatataaaaactaaaaaaaaatttgaatgtcttttaaaattgtttacaagagcatgtattcatatacattaaaagcaaagtaactaaatgaacaaaataaataacatgattgtgactactcaactttcactttgcaggaaaaaaaatttactttgcaccaattacacattcacaaatgtaaagtgaaagttaccaaatctacgtgcaaaagcaggtaattttcttcattagtcatgctctatcttcagatgacataactttcttaggatggtcaggttctaaaaaaaactatgctttttcgtgactgccttagtaaactatagatataattttgttgcttttactaaacttaagtattcaaggttacacataattacaaaagcacatcccaaaaaagaggtccctgggtatttatgtgaacattatatatactttaggaaagtgtatagcaactgcccccagcaatgggggaaaatatcagccacgtactttgtaccgagaaagaacacttttaaatccactgctagagcctaaaatcacagatgtcttattacacaataaagctaaaagttcattaaattttgcctacattaaagaatgaataatgccactgaaaggttttgcttatttaaagtaattcagtaccaaatccttctgtcattgctgttgttgttgtctaatacaataatcacactctcaatatatttgttttatgaagttaatactttcatttggttgaaatgtaatgtcaactagcattatttacactattttataccttgagccaatacatgggttgtacaaggaagtatttctaagaaaatattagccatgcctttaactctatcaaaaatgaaattctggttcttattaaaaagaaataggcgcactgcacttacaattcttaatttaacccttgaaagagtttattcatatcctaccatgttccaaagtcaatgaggtaagttactaaataaatctacacactgatctacttacaattttatagaagagattcactaaagtttaccaataaaaacaaatacccaataaaatattttattcaagaacaaaattaaatgtgccctttgcaaggaagatgacaaaaaatttatatgttccaagagtgatgaaggaaaaggtatggcttaattctaccacctccatagataactgtcattctagccacagagtcaaagaatcagactattacgtaagattctacacacagtcttcctttaattataataactaaaaccttctgaattttactttaaattaaagaaatgtaatttcacatacctaattacctaagcctaaaatcatgtactagaacaagggctcatttcacttattatgatcaatgactgccacctagtggatataactttcctcaaatctctatattgagatttcctagtgcttacacttcagcttttacggatgacaacttccattcaaagtggcttttttagaaattaaaaaggagaagcaagaaactttcacattgctttatgtatcttttctatgcattagttatgaattagttttttatttagattggaacattacgtacttatttaagaagatggcataaacttaaagataacttaaaaataaaactattctattacaattcctttaaatcacaaattcagaagcactgtttctgaatggtgaaaaagatgacatacaaactatatagttcaatatacttcaatacaaacatgcagcttcacttaattatacatacgttttatttaaagaaaagcaaaacacacaaccacagcatttcaattaaggagcttagaaaaatttcaagtgcgttcttggttctccagttaccattccaataaaaaactttttaaaccaaagttaaaattaagtgaaaaagaaagaagtcccagtaagcagaccgaacaatacaaattcaaaatactactctatcttcttgtgttcgttcccaccaaagtgtgctgtttaaagttccacaactattatcttcctcctcttgttctttagtgagttctacaaaaacctaggtgaaaagaaataaatgaatacagtatgctgtatctcaagtacctcaaagaacttttaactaaatcagaaatggtacaaggctatatctagttatatcaacaagtatcaagagatttattaacattaacattattcaaacagattattttcaaaagttacatgcaaagatgaatactattttagattaatagatatgttttttaaaaaataattcataactacttaaacaatgtaatttcaaatacactaatgtgaaacaccaccatcatgactcactttctttacaaaatgaaaaaaacagatattcaaaatcagcaaatgaaagttagcttgatttaagcattccatattgcacacatgtatcaaaacatcactgtacccaataaacagtgtgatttgtcaatttaaaataatatcaatttaaaaaataaaatttaaaaaattagtaagtgaagaacctaaggttgattaaaattataccaagtttaagatcattctgtaccaatttgtcactggtttacgatatctctccctctctaatataaaccaaaacaatcgatatcagatactttcttctataaaataatttttaaaaatttaactttatagtacctgttccaatgttgcttgagaaaagctatattcttcaatggcaaaagcatgtttagctattaaaatataaaaatagtattttacttatcaatatctgaaaaaaatggcaatacctaccaaagtggctaacaatgttttaaaatatctctgtaatcaacccacttaaatttgaagctgccaaaacatgttatttttcccgcttacttcctttctcttccccacacctataattcctctatagccctaagtactgtatgttgaatgttacttgtcttatttcactttttctaagttctcctccattatctttttcctggtgattcttttcatgtcttcttttgatccctgctctcttatctcccattctccaactccactgtagcctattctggcttcttgaactagattctggatattggtcctatctccataaaccttttgttttgttttgttttgtttttaagacaaggtcttgctctgttgcccaggctggtatacagtggcctgggcaacacagcaagtatacaatcatggttcactgcagcctcgacctcccaggctcaaacaatcttcccacctcagcctcctgagttagctgggactacaggcacatgccactatacccgggtaattttaaaaaatattttgtaaaaacagagtctcactatgttgctcaggctggtcttgaaccatgggcttaagggatcctcccgcctcagcctcccaaagtgctgagattataggtgtgaaccaccatgccggccaataaacatgaataaacaatgaacatcatgcaggccatatattacagaccaaaaaataattaattagtgttcttggcaaaagtaaacccattaatccatagctgcaacaagaatatatacagtatcaggaaatctttttgtattcagtaatcacataaagaacaatcataaaaatcctgtagttattttgaaaattattaataataaaccttatacataaatataggttgtttcacagtttataaatgccataaaataatctgcatatgaatacctgattcttccaggaggtgatctccctcaactgtcaccagcatatatatatttatcctacataccacttattttttaaatgccaagattctataagcttccttaaaattttggggactgcccacccctcgctacactcagaattctctttgccactggagtcttgatagtgttgctacttctatggaccagtatgaagtaaggattcaagaaactcagagctcttgctgctggactaactgcaaagactcgataattaagctgacccttctcatagatgcaatgtgataaactgtgtcaatgctctctaaaaattgtaaaaggtttacattacaatagagtttatctacaaaatccctatgacattagtgtttacctgtgtcttagattaaatgaataaaaggttatcttcttatctgccatagtttctaaaataaaccgagtccccagttttaaactttttaaataaaattctttcataatttgagagctacaacataagtgcttttcaactacttaccttcttccagcttaaaaaaagattgtgaaagggactgaacatcttccttaggaattttataagccaaaatagaagatactacttaccttcttccagcttaaaaaaagattgtgaaagggactgaacatcttccttaggaattttataagccaaaatagaagaaaaactggaaaaaaagataaaatatggaaaaaaattaaaaattactactattatgttctaaagctaaagttcaacatgtttaaaattcaaaattaaattcaataacttattttggtatttagttggatgaaaattgtttaaaataataacattttcatgcaaaacaactctcattactactaagaatgttaaaaaaatttaaatactactgaatattgaaaaatctaatactaaggcagatataaaacaccagccatcagacttcattagtccagtattggtgataatacagagagagatatataaattatctatctacagatacatatatttcatatatatgaaaaaatatacatatatattcacacacagagatatatatatatatggtctatgaatgaaaagatgatttttcacttaatccttaatataataactttttataacctttgctctataaagaaatataaccacattctttaaaattttacctttcctgacggcttgcatttgggaaaatatactgaatttctctttgaaggcggtctacttctaggttttctatccagtccttcaatttaatttccaaaaagtagccttttccaaatttactctttagatgttgtactgttccgatacatctgaagtaattttttaaaagaaagctcagatataaaatgacagcttcaaagaataatctctcacacatataactacattttaaaaaaatatacctttatatttagagaaaaattacaaagaaaatacagcatccccatacactctttatccggtttcagtttccctaatcttatcatcttatattaccatggtaaattcctcacaactgagacaccgacattggtacattccttgtcactgaactccatactttatttagatttcaccaattttctattagtgtcctttgtttattccaggttctatccaggataccgtagtgttcttggctgtcacgtcaccttagtctctaactgtgggtgacagtttcttactctttctgtctttttcatgattttgacagttttgagaagtactggtcaggtgtgtgttagaaggtccctcaatttgggttagtctgatatttttctcatgactacacttgggttatgggttttggagagaatattacacagctgtagtactttttccatcatatcatatcagtgaatacatgatatctgcacaacatcgtttagttaaggtagtatttgccagctttctcaactgtaaagttactatttttctccttctgtcgttcattttttacaagaaactggctaagtcccgtccaaacttgggggataggagattaagcctcctcccttgaagtgggtattatctacatatattattatttggaattgttctgtaaggaagatgtacctcttctctgacacatttctttactcaattatttatttatgtaagtagaaactcatatgtttatttcatatttgtgttacataattaatccaatatataacaattttttgaaataacaagtactatgcctaaaaataatattccaagttattgaaatattaagtgaattcaaattcaaagtagacagccatatttttaaaaaactcaacatacttccaagtcaatctatcaaaagctaactcaaaaactaaaatatttaacatttaaattactaactattgccatgtttttgaaatgatgactttcaaaatccaacccccaacctcttcccctgaatggcacgctatttagacatcaaccttaactgcccagacaccatgatagctactcgatcacagacagcctctgcctcctccatatagtgagtggtcagaatagcagcccgctttctgtttttaaatgcagttcgaattgctcgcctataaaacataaataaaacaaaaagagaggaacacatctgtttgttaaaaaaaaatgggtttttaaaaatccaaccggttggttaattaagttaattaaaacttaccaaatatcaattgctatggctattacatcctgcccaactatgatttttttttttttgagacggagtctcgctctgtcccccaggctggagagaagtggcccgatctcggctcactgcaagctccacctcccaggttcacaccattctcctacctcagcctcctgagtagctgggactacaggtgcctgccaccacacccggctaatttttttttgtatttttaatagagacggggtttcaccgtgttagccaggatggtctcgatctcctgacctcgtggtctgctgcctcagcctcccaaagtgctgggattacaggcgtgagccactgcgccaggccatgacttttatattctaatttattttcccttcattttgaaagcttgtcaaatggaaaaaaaaaatctatgatttcaaatgttaatatgggctaaaagtatgacaacaaataaattttaaaattgatgccttttcatgttataaccaaaacaggctttgaatcataagaaaaccgtaacatgcatccaaaccaaaccttacattttatagacatggaagttgaggcttaaagagttgttcaaggccaggcactgtgcctcacacctgtaatcccagcagtttgggaggccgaagggggcggatcacctgaggtctggagttcgggaccagcctggccaacatggtgaaaccctgtctctaccaaaaatacaaaaaattagccgggcttggtggctcttgcctgtagtcccaggtacttggaaggctgaggcaggagaatcgcttcagcctgggaagcagaggttgcagtaagccaagacggcaccactgcactccagcttggtcaacagaacaagactctgactcaaaaaaaaaaaaaaaaaaagagttgttcaactaattagtactttacaggcactgcataatgacatttcagtcaatgatgaaacacatttccaacagtgattccataagattataatacttttataatgtatcttttctgtgtttagatacatctagatacacaaataccattgtgttacaactgcctacagtattcagtgcagtgacatgctctacagatttatagcctaggagtaataggctataccatatagtctaggtgtgtagtaggctataaccacccagagatttatataagtacactctattatgtttgcacaacgacaacatcacctttctcagaatgtatctctgtcattaggcaatgcatgactgtcctagaaagagtctcaacataaatttaagacactattattatggaaaagatcatttgtatgctaaatgactagaaaaaaacttaaaaactattcagaacactagaactctttatcttaataatgactcatgcttatttctgtttcggaatatgtaaaatattatgaacacttcatgaaaaatatgcaaagttttaaaagcttaaggaaatctctaaatctatttaatttttaattactagtgtatcgtttgaataggatttaaaatcaagatgtacatataactaacattaaactattataataaaagaaactgttctattctaaagtatcatgtactgtgtcacaagtaccatactcaccacatgtgctgtttggctttgggatccatacctgtagatggttcatctagcaaagtaatctgaggattccctagcatacttagagcaaaacacaactacatggaaagaaaaagatgggtgggaaattaacaaaggttcactataaggaatctatcaagacaatatcaggtactaaactatcaataaaaatacaggcattatttggtgtttaatgaaagtacctttcgtttgattcctgcaggtagtttctttacagtcttctgaagatgttcttttaaatcaagtgcatgtgttattctgcaaaatgaacaatacaaaatgagaataccatgatatatataaacacaaataccaactgggtgtgatccctgatgttgttttctctagaatagttacttagtcgaagcttattataagtaggtaagggcaaaagtctccaatttacatcattttaaataaattaatatcttgataaaatggttcactttgaattaaaataagtttcatgatatctataggtatatttatcctgtaactagaaattaaaaaatgacctttttataactatcataatttacagctatcagtatattttcatatatcataaagaatatatgaaaaagtaataaacattttctataaaaatcattgtccacagaaatgcttgttatgaaattttaaaaatatgaaatgcaaacctttcctctaagtaacaaaaggaatctaaagacaattattttaccgacttatgacttctttcatgtcacttgcactcattcctttgacagctccataaatttcaaaatgttcctgcaatgtagtatctggccacaaagggtttatctgaggacagtaacccatacacttcagtgaatcatcatcttcacttgtctctgaagaataatctcctaaaaatacctatagaaacacaaaccaatttttattattttgcttaatttacactgtgaaggaagtggcaagtacattaattaaaaccccttcctacagccagactaatatcaagtcagatttgtactcctttattgtcattattattattatcactaagtaactgagactacaaacatgtgccaccatgcctggctattgcttttttcttttttgaattttaggagggaagatgtctcactacgttgcccaggctagtcttgaattcctgagctcaagtgatcctcctgcctcagcctcccaaagtgctgggattacaggaatgagccactgcacccgcccagatgttttactcctttttgatgtttgatgatggaaggacatataaagctaagtcagagttcagagacttggtcagaaagggtaatacagagttggatgaaaaagcaagatgtaattctaatgatcagggagcttcactggaaggtgacatttgagccaaagaggtaagtgaatttagtatatgtatttctagggtataaggtatagccaaacaaagaaaacatcttgggcaaaaacccaaagaaaagagtatgcctggcattttccaggaaagcaatgagttagtgtggctggcataaagtaagcaaggggagagaagcaggaaatgggatcagggtagttttgtgaagtatccacaaagtggtcagtgacatgcttataataaaagactagctgatggcaggtcaaaacaagctcccatatctcctgaagctaataaaactgtcttccattaagttggtagacaaataactcacgcatgtaagcattacaaaagcagaaatactgtatatgcgtgtgtctacatgtgtctatgaaaatttcaccatgcacattatttttacagataacccaaaagatcataatttgatcaggctgtacaaaaaattctaaaaatatacataaaaattgaatataaaatccgaatttgtcactaaaagtttatgttaattaacaatataaatcacattcaacatatcctatactcttatatatcatacctggcctgaagttggttcaatatcaccaaccagaatattaataattgtgcttttgccagcaccatttggacccaatagtcctaagatctctcctaaaggaattgaaagaaaaaaaaatcataatcaaatcatactaaaagtagaaattactcttctagaaaagttatgtaaggaaaaattaaataccagccttttttcacacagaaagagatgtatttagttgccactttctttacttttcttgaaagaagaaaatctttcttgtcatcatattctttatgcaaattgctgaccataatggatggtttctaataagaaaaattgtatttaaaaagaaagttataaaacttatcatgaaatgacaggctgcacatacctcatatccatattacaaaaattatattggctaataaggggatactgtacaaataaatatccatttatgactgaaattctggcttattcaaaagtaagtaaacgaagtatttttttccaagaaagatttttttcagattgcttcatatgcaaagaaaaatatttttcagattaatttctatataccgggaattgatcatttcatatttactatgacttagccataaagaataaattacctcctcacaacactggcaacccatcagctctttgacctttagtctttcagctttgacatcttcatcttcatcctcattgtctggtggttctggaagcttcctatttttagacttcgttgaaaggtttctacatatatataataaatataaaagacagtaggttttcaaataattaaaatagtaagaaattcagatactaggtagagaaaagactgaaaaaatacactaacataagatctaggattatctctgaaaggtggaattataagcgatatttctttttttttctttctttctttctttttttttttttttaagacagggtctcacactctgttgcccaggctggagtgcagtggtacgatctcaggtcactataacctctgcctcctgggttcaagcgattctcctgcctcagcctcctgagtagctgggattacaggcacgcgccaccatgcccggctcatttttgtatttttagtagagacagggtttcaccatgttgcccaggctggtctcaaactcctggcctcaaaagatccacctgcctcagcctcccaaagtactgggattacaggttcaagccaccatgcccagccacaagcattatttttcaatgactgataacatttggacgatattatctaaattcattcatttattcaacaatattatttatgactagtaggtgtcaggtattattacacagaaagaaagatgaaaaaacatgaaccttgccctcaaaaaatttacaacctgagtataaatgaaattgcccagaaagagtagatgtagagggttgacatcagaacccacagtaacaccatttttagggatagacagaggatgaagtgcttgcaaaggcaattttgaagtacagaggcaaacagaagacataatggaaaacaaaggaacaagaaaaatgtggccaggcgcagtggctcctgcctgtaatcttagcactttaagaagccgaggcatgcagatcacttgaggtcagcagttcaacaccagcctagccaccatggagaaaccctgtctctactaaaaaataaaatacaaaaattaaccaggtgtggtggcacatgcctgtaatcccagctacttgggaggctgaggcagaagaatcgtttcaaccagtgagctgagatcatgccactgcactccagcctgggtgacagagtgagattccatctcaaaaaaaaaaaaaaaaagaaaaatgtgtaaggagaacaatgtcaatcatattaaagcctgcagattagttaaataagttgagcctattagacaatgaaaagacaaaatcattagttatcttattgaaaatagtatcaatggaaaggtaagggaaaacccagattgcagggagttataggagtggatggaaggtgagtaactggagatagaagaattttggctatgaaaggaaagagagatatagaataggaattagggatggattcatgttcaaatgagatccatgggttctttcatatatgaaagaaaggtgaccctccccaaccccaaaaatataccactgagatccagaaaggaaagagaaaaagagaaaaaaatacactattgagatctagaaaggaaagagaaaaagagaaaaaatacacttttgagatccagaaaggaaagagaaaaagagaaaaagaaaattgagcaatattccaagtatatagaataaatgaagatttgggtaataggatggactgctgcttcctctaggactgggaaaaggcaaaaatgatggaagatgtgagtaagtttgtagaaatttataacttataattaagtgcttctattttctgagataaatgacaagattatttactgagaagtaggaagtaagataaggtgatttgaggaatacaaggaataaagagaaagctttgaataactattgaaaagaaagagataagaaggtgctaactaggaaaatgttattcgttaccaaacagtattaaaatataactaccattcaacccagcaatcctactactggatatatatccaaaggaaaaaaaaaatcattacataaaaaagacacctgaactcatatgttcatcatggtactattcacaatagcaaagtcatagaaccaacctaagagtccatcaacagttgactgggtgaagaaaatatggtacatatacaccatggaatactccacagccataaatagaatgaaattatgttctttacagcaacatggatggaactggagaccattatcctaagtgaactaatttggaacagacaatcaaataccacatgttctcacttataagttctcacttataaacagacaatcaaatacaacatgttctcacttatcagtggatacacatgaacataaacatggaaacactaggactgtggactccaaaagggggtggggataagggttgaaaaactacctattaggtacaacgttcaccatttgggtaatgttacaatagaagcccaatccccaccagtatgcaatatacccagctaacaaacatgcacatttacccccaaatctaaaatattttttttaaaaaaccagctgaatttatatggaataaatatgtagtattatcaaatggaacttttatgttattttttccagcatataattcgattcaccaataattataatttttagtggacagttcgaaaagacaaaagttgaggatgctgaaatgataataaagtgatgaatcatgtaagcaaggctggatagaagaaaaagtaaaaacaaattagctaatatatttggaagaatatgtaaaaaagacaaacaataacaagcattggcaaggatgtggagaaaatagaaccctaaaacattcctagcgggagtgtaaaatggtattaccactttagaaacagtctggcaattcctcaaatgacccagcaatcccatttctaggtatccacccaagagaaatgaaaatatatgtccatacaaacagttgtatacaaactagcaacattgttcataatagctgaattcatagcagcattgttcataatagttgaaaagtaaaagcaactcattaagatatataaaaagtgctacacacgactacatgataagccctccaaacattatactaagtgtaaaaccatatgctagatactaattatagtgcccaaatcctagcaatttttcaaagatgttatctggcaaatctgatgattttccaacattaaaataacatgccaaccaactatggtaaaaagcaaacagatataaaagttaaatacaaggtatttaagagaattgttggtcttttgactcaagttttccaaagcatatttccattgtccagttatataaagtgttcagaacaggcaaatctgacagaaacagaaagtagattagtggttacctaagactgggagctatgggaatagggataagaaagtggctgttaatgggtacaaagtttctttttggagtgctggaaatgttccaaaattatgttatggtaatggttacacagttctgtaaatatactaaaaacatttaaaatttttaaaaaatcaactgacctgaaaaagggatcttttcttattgatctgcctccatattttttctcatagtattgtaagaggaaaatccacagtacacactgcaggtaaggctaaaagaagaacatgtagcagctcatgactaaaagatttgttgttgttgttgttgttttttcctttgccaacagaactaagactacatacatcaagttccttgccattaccaaaagaagtaatcacaacttttttatattttacatgataaagataattaaaaataaattttaatacaaaccaaagcagaattatttttagcaaattattcacatattttctgcctctgtatcattcatttattgtcagcttcataaaatataatcgaacacaaaaactttgtttttgcttctaagacagaactgtaattaaacagaattaataacatgtaaaaggctaagtatattaaagtgaacatattcagtaaatgaaaggtactccccactgaaatacagattagctagcgttaactaacatgcttaactttttatgcaccttctttttcatgcaacaggataaaaaactaaacatagttaaaaccataggaccaaaccattcttaaggtacatgctaattcacaaaaacactttatttcttaccgatataacagctactgaaagcctatcccatggattataggtgtccacattttttcgtacattcttccaagaaatctaagacaaaaagatttgaaaatatatacgctgcaatatgtagaaatatttggattaaaatgaaaaaatgtattttgtttagcaaacgtgtactttctataataagttagctgttcatattagtaagttatgttttttacttaaaatcttccctgtcccaaaatatttctgaggatcagtataaattaaacacattgaactgagacctaaaaagggaagcaggggtagtaggattagtaagtagaattaattagcaattccaaaccaagaattcataacaatattttttctaatcacatggaaatttctttcaattatccagccttaataaaatcaatctggtttttgtctctattttttcttggagaaaatctcttacactttattctttctcatccctttatagtgaaatacgttatttaatcactgataaactcctaaaaacaaatactgactgaaaccatgtcacacttctaattatatacatcattttgagcatgagagaacctgtaatgaacatagcccttttcctttgagaatttacagtttgacaagagctcacaataatttatgctgcattaataatatctaaatcaagtagtagccattagcccaatgcattttactgttttctatacaagaactaacatccccaaattagaccatatttattttatgttttttaacatattaaaatatttagcagaattacctttatgaaagaaatcaggcaacctagaagtggatagattggaatgatgatacaaaaggcataatgaagaatagttgcaattgtgtatcccataaagaaagttatttcagtgattgcaatacaagccaacgctgcctaaagaaaaaaataaataaataaaagtgacaaagtgtttagaaacttcttacaaattggtgtctacgcattaaactattttttcaatcctctaataaaacatggaacaagagatgatatttagccagcaagcaacaagaataccacttgtttgtagctagtatccttgatacactagttgctaaatctcttccatattgttcctacgtggaaaggatgattcagaagacaaatgtacacacaaaaagaagctgccaattacctatctaaattattcacttacaaaagacatgtaacatttttagtataatcaggaaagaattcatgttaattaaactgctatggaaagttgaaataatgtaaaatgtgacttaccacagaatagataaatgaccaaaattctttggtatttaaaattttcttaaaggtgaaagaagcaatataagtgaacagaataactgatggaacataaccaataaggcaaaaaacctgtaaatcagaaatatgtttctataaaaatatgaatagcttgcaatacacatgacatgaaatactagccatattaaaatatgaaattattaatataatcctaaataaatcatttaaactgaacactacttgtagttttttgtaccaagtaaaatactatctctcattattataaaaagcaagtatagctagctacaacgttctctctctcaaatattagctactattttaatatacagcactttattttttaatgtgtaagaaaaacattattattttatatggcagaaactaatatataaggtcattatgatctctgacaaaatcggtaaatttactttcagcatcaacctcatgtaactctgttttccctttttcctaataaagtaatcaatgaaagggcctgctgtcagtcatttacatgtgaacatgaatgcaaatcagtctcttctttgatattttaagctatattttattttaagtaatttctagttttactttagaatcaggggatacatgtgcaggtgtgttacatgggtatactgcatgatgctgaggtttggggtataattcattctgtcacctaggtactggacacagtacctaacagttagtttttcaacccttgctccccttcctcctgcccccgtctagtagtgcccagtgtctactgttgccatttttatgtccatgtttacccaatttagctcccatttataagtgggaacatgcaatagttggttttctgttcctttgttaattcacttagaataatggcctccaactgcacctgtgctgctgcaacagacataatttcattcttttttatggctgctcagtattccgtggtgtatatgtaccacactttctttattcaatcactggtcaatgggctcctaggttgattccatgtctttgctattgtgaatagtgctgcaatgaacatactcatgtgtctttttggtagaatgatttattttcttttggatatatacccagtaatggggtttctgagttataaggtagttctgttttaagttttttgagaactctccaaactgctttccatggctgctgaagtttacattcccaccaagagtatataagagtatataagcatttcattttctctgcagcctcgccagcatctgttggttttgactttttaatcatagccattctaactgacatgagatggtatcttactgtggttttgatttacatttctctgatgattagtgatgtagagcattttttcatacatttgttgtccatttgcatgtcttcttttgagaagtgtctgttcatatcttttgcccactttttaatggagttttgttttttgattgctgaattgtttaagtgccttatagattctggatacttggcctttgttggatgcatagtttgtattttctcccattctgtatgttatccatttactctgttgatagtttcttttgctgtgcagaagctctttagtttaattaggtgccacttgtcaatttttatttctgttgcaattgcttttgaagacttatttacccataaattctttcccaaggtccagaatggtatttcctatgttttcttgtagaattcttatagttgatgtcttacccttaaatctttaatccatcttgagttactttttacatacggtgaaaggtggaggtccaatttcattcttctgaatatggctagccagctatcccagcaccatttattgaacacagagtcctttcctattgcttatttttatcaattttgttgaagatcagatggctatagatgtgtggctttatttctgggtcctccattctgtttcatcggtctacatgtctgtttttgtaccaataccatgctgttttggtcactggagcctttatagtatagtttgaagtcaggtaatgaaatgcctctggctttgttctttttacatggattcctttttttttttttttttgataaaaagtctctctctgttgcccaggcttgagtgcagtagcacgatcttggctcaacacaacctctacctccccggttcaagcgattctcctgcctcagcctcctgagtagctgggactacaggcgcatgccaccacgtccagctatttttttgtatttctagtagagatggtgtttcactatgttgaccaggatggtcttgatctcttgacctcgtgatccacccgtctcggtctcccagagtgctgggattataggcatgagcccccgcgcccagcttatgtaggattcctttagccatctgggtacttttggggttccatatgaattttagaatagctttttaaaattctgtgatgaataatgttggtagtttgataggaatagtgttgaatctgtagattgctttgggcagtatggccactttaatatattgagtcttctaatccatgagcatgaaatttttttccatttgcttgtatcatctctgaattccttcaccaatgttttgtagttctccctgtagagatctttcatctcctctgttagatgtattcctaggtattttaattttttgtggctattgtaaatggagttgtgttcttcatctggctcgcagcctgcccattattgagatagagaaatgttaagctatattttaaactatggaataaaagagcttatcctttgtgaaattattttcaggcataagaaaaacgaaggaaggcattttaaggaaggaatatattaaaacgttcctgattacacccaagtaggtggtctacatgaaagatcactttagtttcaagaaattattttaaaatggtggtaagttattgtttttaaaagtcacttatcatataaaatgattacatgtattaaataccagacacacttgctctattttctttaacaaattaataaccaaattatgcaataagtcaactgtcatgtttataacagattttaaataacattctatctataaatagcatgagtacaactaacgttaacttaccacagcaaggaactttacagtataaaaatataatccataatgaaatgccaataagcttcctagcatcaaaataagaatgataaaaaataaggggatatcaacaacagcttgtccaatccaatatgcagatggcaaaagacctgaaagtttaagttgagtataagctttgatctaaaaaaaatgaaaaacaatttattataattttagacactttagaaacacacaaataaattagtaaattattgtagatctcttaattttacatcagcaaaaccaaaaaggttacattccaggcttataggtaataaaagtccccctcacactaaatacaaattccatttagcctttaatttggctcattatttctgagatgtaacaatttcaacaaaatttttaagaatcagaatacagtagtgctgccaagaaactgagattaaaataaagcaaaaggtgtcatggcggttggggttacagctatacaaataataaatagccaaaacattactacttttgaaatactgtggaaacagatgggaagacatgtttacacagaaaaagaattctcagttttaaaaatgaacctttcataaataaaaacactaataaattgccaagtatcctttggatttacataaggctttcagcttaagtgaaagcttttgaaatgttcaaagccttttgtgtacactggtatagcatataaatctaaggtgttatttacgtcacaagtttgttaatggtaaactcaaatgatcatagttttcctatctcatgttctcatttaatttgaaatttctaaaatatttcataaatccaaatacctaacaattttatttagttgatttttgtcatctataaaaatatctactcctaataactgaaggtattatatgaaagagctgtccacagagataaaggaagcatgaaatataaagattagttaagaagaggagaaatgaacaaaattggcaagttttctgttcaatgaattatgagaacatgagacacatgtaaattctaatacaagaataaaaacataagctaaggcaaatgcaattattttggataattcaaacttttgtcattcacacactgctggtagggataacataaaatggaacactcatcttggaaaataatttggcaatttcttataaaattaacatgtataattcagcaattgcactcttgggcatttatctcagagaaatgaaaatgatgtttacacaaaacctgtatgcaaatgtccacagcaactttacaaaagccaaaaacggaaaacaatccaaatgttcttcaacaggcaaatggttagagaaagtgtgatgtatccataccatggaatattactcagcaatgaaaaggaatggattattgataaatacaaataggatgaacttcaaaaaaaatgctatttgaaaaaagccaatcccaaaagaaaacttattgtgatgccattttacatttttgaactatcaaaattacagaaatagagaacagagtagtggttgccacaggtcagagaggctaggaaagagcaaaaaatgggaatctttttggtgacagaaatgttctgtatcttgactgtgtcaatgccaataccctgttacattgtactataattttacgagatgttattattgggacaaaatgtaaagagtacacaggatctctctgtcatttctaacaaacaaacatgaatatacaactatctcaaaatagaaactttaattaaaaataagttagtgggtgcagtgcaccagcatggcacatgtatacatatgtaactaacctgcacaatgtgcacatgtaccctaaaacttaaagtataataaaaatatatatatatataaataaaaaaattaaaaaataaataaataaaaataaaaaatttatattggaaaaaaaatgtttcagttgaaacaagaaagaaaatgcaaatgtccagtaaattttattattgtgcagtgggttatggatttctatattccttatacttttctataatttatacattactacaatgagtatatttaacaaaaattgaatattattttaaaaatagagatatgtgttacttttatagtaaacaaataacaaaatttttattagaatgtatttatttattttatttatttatttatttatttatttttgagatggagtttttgctcttgttgcccaggctggagtgcaatggcatgatctcggctcactgcaatctccgcctctcgggttcaagtgattctcctgcctcaccctcctgagtagctgggattacaggcatgcaccaccacgccctaattttttttctatttttagtagagacggggtttctccatgttggtcaggctagtctcgaactcccaacctcaggtgatccgcccacctcggcctcccaaagtgctgggattacaggcgtggtccaccacgcctggcctacaatttatttttttagaatttattaaaataatgagctcattattcatcacagtctgtaaattaatttagacaaatttgtttttactgaattaagatcatccatgaagaagatcagaatttttattagagcagtaagatataatctcagcagagtgaaaaagtgggaggctttgaacaaccaaagactgtacaagatcgctatatgcctgaaggaaaacaaaagggaaaggcgtaaaaagaaagtgaaagaataccaaagaacctctgtatacttagcaatttctccaaggccctaatgatgacaatcactttcatctattttttttccattaataagaatttagcaccttgactacttaatacctctgttaaaggataaaagggacgggcatgttagtttgccagttaagaacataaagatcacagtcacttcccaaatccacaatttaaacaagttgagtcaacctgagcaagtcatatgaacaatcccatctttgatttcctgatctataagaaatcagtaacaaaaaacttacctcacaatgttgtgagaattagagaatataatttttaaagcatgtagcaagtctcaaataataaatattaattatcacttattacaataagaaactataataaatgtatttatattccatttacttatttctgaaataacaattatactaagccttgcaatcaagcaaataggttatttttatatgacacttcttattagcaaattatatatttttaactgagtcattaccttatgattctctgcattttccatggcaaagtaaggtggcattgcagtaacaatgattccaagcaaagctgcttgaaaatacagctcaattttaaaaactatatcagtaatttcctgaaagacaaccacagagtaacaaatggaactgagaatcattttatatcttaagatatatcttaggatatatcttatatcaaaaaaaaatcaaaacctcagaaagaatgtattagaatatctaacccaggcatagtctacatgaaagaatgagtggcagatgtattaacaggtggttgtggacaatattaccaactctgccacttattaataactatctgatcctaagcaaatcattttactttcattttcctgtctacaacacagaataatcaggcatataaattacgcttcacaatttcataaaaatgaatgatgtatttgaaaagcagttagtatgtccaccatagtggtcctatgaaataataataaatatctaagaatgatatttgttgctcttgtctttttaattgggaaaagctatatccaagctcagcttcctatggaactagaacttcttctcccaagcagaagaggaattaactcccacaggccccaatgtcgttagcttccccagggatccaggtgcagtcagctaactttcccagacaatcaataaacagctagcacttcaaatgcagattacccaagtccaaggatactatattatcagccaccctcaccaaggtcagtttcctccccttgttctataagaatacagacccgtgggacagagaaggtactctgcactggaatagaatccgcagtgcctagcagataccctcgcactggcacacccctccatgggatgacatagagacagagtacatcactgtcttgctgaaacctagccttctgagttttcctatttagcaattaagtcaattccaaagttcaggtcatatgacattgcagaatttgtctgaaactctcgtaatatgacagtggaggctcagaaagaacccacaaatatgtagactagtagtgcaagaagtggaaatgaatgagactacagttggatccaatcatacagaatctaatgaagaaacaaatttgaaatattaatacgactatatatgaatagttagcttcaaaaactcccatgtatttctttcgaaatatagtatgattatatgtcagtgttgttgaaaattgtaagttgtaaaatcttgtgtaatagttatggatacagacatatgtagtaacatcaaaaaaacacgtatgggaattacaaattgtgaaattgtgaattgcggttactcctacggaggagagaaggaaacaagattggagaggggtaacatgagttttcacctgtgtcttaaaagttttactaaaaacaaatattatgcaatattaacatttgaaatatttggatagtaggtggttcgttttctgtacgtttgaaatatttcataatatgagatacctctccacagacactgctgctggaaatggaaaatgatgcaaccattttggaaagcagtttggcagttcttcaagtgttaaacatagagttactagatgatctagcaattccactcctaattatatatccaagagaaataaaaacatatgctcatacaaaatcttctactcaaatattcataagcattactcataatagccaaaaggtggaaataacccaaatgccatcaactgatgaacagataagtagaatgcagtatttcacataaacattccatacattccacacaatgaaatatgatttggtagtaaaaataaatgaagcactgatacgtgttacaaaacagatgaatcttcaaagcagtatgctaagtacaagaaagcagacaaaaaagactacatactgtatgattccatttatataaaatgtctaaaataaggaaatccatagaaacagaaagtacattagtggttgcctagggttgggagtgggtatgagaggaaatgagtgattactaatgagtataagggttattttttttggaggggggtgatggcatatttaaaactgactgtagtgatgactgcacaactctataagcataataaaagacaccgaagtgtatactttgaataatggtcaggttgattgggcattatatttcaatgaagctgtttttaaaagtatgaaaagaagaagatagaaaatattgttacagatatttgtccatttattttttagcatatgaaaatcaaaaggattaagagaaaatatgttggatacttttctgtaatcttgattctgatatgtacaatccaacagttctatctagaggaaaaatggttgcctgggtgacttctcaagtttttttcaatacccaatacctggattttaggtaaaaaatattcatttaaaaattatcttatattttattctatgatcaatatagaacacacttattccttatacaaatattaataccaaaacagaatctcctttaccctgaaacatacttctactggggaatcctaaaccttaatgtaaaccgtttctcacttgagttttaagaagtctaagagatctcacaagataaatttctacatattttgttatttttgcttagtttttaatggttattatatatatgacatgcatatggaaatttatctgtatatacattggcttacttgaaagaatggggtactccagatctggatggtttcagtcacatttaaatgataaagatagtagttactaatgatattcactaatataggtaaagaataaaccatagtactgttgaaaacagctgcaaaaacatagtcctacaattaaaaaaaagacacttattacatactgtatataagcggatatattattgatatgtaccaagcttttctcaccaacaaagctaattctcatacagaaaaactgcttcaacaactcacagaaataatactcaatgacagataaagacaatctggtttggaatgtacagatattttaatattttaaacaagcatataattttttaaaaaactaaatttctgtaactttatatattggtcatctgtgaagtaatgaaatatatcataaataaagacagctagttatttccaaaagtaaaatctaatttctaactcataaggtcaaatcaacaaataattaattttagaagaaacgttttaatcttgcataactcccaaatggatattcattcactgcattcatcttaccttttctgaatgcatcacatttaaagccgcactatggggagccacggatacatagtcactgtcattaatcatcgtcaccattatgttctggcttgtgaaaaagctaataagatcactgatatctgagtctggtgttagaaaataagcaaataataaaaaatgagtctaaacgaggcttttagtaacactgggaagataattctatttttagagaaatattttattttcattagcgaatacgcaagtaagtacattggctctgaagccagtcagcctggttttaaagttgagttgtaacattaaactattcgtccttcaagcaagttacctagatgttctggaccttaagttccctcttttgtaaagtgggtaaaataagtatatctgccttataggtagagtgatcatcctgagaattaaatgactgaatatatacacagagtttagaacctgacacatagtaactgcgcatattttagctgctgctgctgctgctgccaccactgctgctgctgctacaactattattaacattgaaaagttaacctataacacatgaaatttggttaaataataagaataaaaatctatctgacaattttaggtaacaagataacctgctaagttcagaaaggtataggtgtggtaacatcactccctagagaattttttgtaggctctgggcagacatgtcaattgccttaactaccttaaaatattcaaacacataatcacatctctacattctctaaagtacctggagccaagagtaagattttaaatcctgtcgggatttaaatctataccaacatgtctgccgaatagatgcagtttctcctccatcataacaaaaatcaggattcagggaaggacaaatgtgactttagagagaaatttaaatcaaacaaagcaaaacattactagtaactgaatagtatggcagggtggatcagacacagcactagatctcagtgtcatagagaatggtgacactactttactcccaacctagtaccttaactgatctcttatctctaacttgcaagaccagctatgtaccctgagaagagagacacattataagtgaaggaaccacagcacaagagatacaaaaagctctgcaaggtgggtaagataccacccaatatatatacacacagaggccagtggttcaaaaaaaagtggttttattttggaacacacacaaggcttaggaaaatatggcatgcataagcaagcaactctaagaataataaaaaattaagagacaaactgaaaatactagaatttctgcagatcaatgagaattaactcaaagcaaaaagatatgatttgaatccaagttcctttaaaaaaaaaagaaatatttgagatacatgtacaattccctggacacatataaaaaatgtcaagattagcacagtgtaaggattatatattagcaatataaaatgtattttaaaaccaaaacgagaattcataatgaaatttcctaatgaaagaaaaaaaattgcaaaacctaacattttccattcgagtaattttccattaattttccatgctccaggtaattttccatgttctcactcatttatccatcaataaatacatctttaccagaaagaatgaaggttatgtaatataacacgcaccagattttaacagtgattattttaatactaatttataatcattcctagccatgcttattattttaatactgggcaaagtcttttttgaattagtgaatcaaaaaggaatgatactagaatgtaggtgaagtgttagaaaggttaaaccccaaagagtctgctacagaataggagatgttataggaacaactgatcacatatgaataaagtttgtattagcttttaatattttgaaaatcagaacactatgtcagttttttgttttgagctttgctcaagtctgtatgtttaaatttttttcatatttgacaactacatggtaagaatactaatagcaaagccaaaaatatccattacaaatctaatatattcaattagagatatttatatttaagtcttatttttcttagttttaactaattcttcagactgtccttgaagaattaaaacacttctatgcagacacatacctgtataaatattatgtactacaactctttgtaaagagggtttttcaacttttgaagtatattttgctcatcatggacttatcagcataaaacatgctagtaagaataacgttattattaaaaaaggaaattctactattatacaaagtataaatttttttaactatttatttatttatttatttattttgaggcagagtctccctctgttgcccagactggaatgcagtggtgcaatctcggctcactgcaacctccgcctcccgggttcaagcgattctcctgcctcagcctcccgagtacctgagactacaggcgcgtgccaccatgcctggctaatttttatatttttagtagagacggggtttcaccgtgttagccaggatggtctcgatcccctgacctcaggtgatccacccgccttggcctcccaaagtgctgggattacaggtgggagccatcgcacctggccaaaactgtcatttatttgtaaaccaaaatttactgtaatatattcttcagcatcaataagatacgtattgaactataatttagatttcatgcagacagaccatgcctttaccttaaatatagttttaaaatccagacctttatccacccctcaaccccatgctccatgccaacactcgttcacagaccttcacacactctcaccagcagaattttgaagaagcagacttgttttgtatttatgtggtttgtctccaggttttagaaaatataagtctggaacaagtttgatgggaaccacagcatttttaaaagagtgatgaaccaaaaacataaaaatctgaactgtgaaaaaaattaaaagcagaagcaacctgaaaagaaaaaaaaaacaacacagctcagggtacaaaggtacattaatatgaaaatcaattaaaactctcccttcacattgatatggactttttttgtttttatttgagacagggtctggttctgtcacccaggctggagtgtaatggcatgatctcagctcactgtaacctccacctcccaggctcaagcaatcttctcccctcaccatcccaaatagctgagactacaggcacacgccaccatacacaactaatttttgttattttttatagagatggggtttcgccatgttgccaaggctggtctcaaactcctgagctcaaacaaggagcttgcctgcctcagcctcccaaagtgctgggattgcaggtgtgagccaccttgaccagcctacattggtatagatttaaactctagatagttaaaagataatcactgaaaaaaacaaagaaaaaaaactgaaaaaaaaaaataagaaatcgtattccccaaaatgatcttatgacaatactggagagaaagccaatactgtacgacaaaattaaaagttataaaagtgtattttagatcagtgatgcccttaaatttttctaagagtatgtaaacacgtagttataactgttaaaacacaagacattatgtctcaaatatttgtctctactcctgaaggaattacttcctgtcctgtctctatcttaaccatttacttttttttttttttttttttttgagatggagtcttgctctgtcacccaggctggagtgcagtggtgtgatctcggctcactgcaacctctgcctcccaggttcaaacgattgtcatgcctcagcctcccaagtaggtgggacgactggcatgtgccactgtacccggctaatttttgtatttttagtagagacagggttttgccatgttggccagactggtctcaaactcctggcctcaagtgatccagctgctgcagccttccaaagtgctgggatttcaggtgtgagccactgcacccagccccatttacttttcacgtaacaagaaaaatattttagatatagagaagcaaataaaaatacaattaaactctgaatggctgatatctttgaaatctcatcctaatcgcaattttatcatattaattgccactgctgctctcaggaggcaaagcaaggtatactacaatgcccttttatctgaagagcagctacttatctgataaaatatctatatatcacatgtaataagtgtcctaacaagcagttggagagcttagattatcatacttcagcaatttataaatttcacataccccgtaatttttttaaaaaaattcttaaattgttatatctaagatttcaaaagcatatggcattgatcaagttccataataagttaagaagtgatttaggttaaaaaatattcacaattaaataatatttggaaacatgaggttaaacaaagttgaaggaatttctttaccagagaacatctcatgttttttatgctaatgaataactctttaatatagggaatataagagtaatattttctaaatgtatttgaccatggaacacattttgttatggattgaatgtttgtgcctccccaaatttgtatgttgaagccctaactcccatatgatggtatttggaaatgggacttcggaaaggtaatctgcatcagatggcatcatgagggtggggtccccatgatgggattagtacatttataaagagacaccagagggtgcatgccagtgtacatgaagaggtcatatgagcacacagtgagatggtggccttctgcaagccaggaagacagccatcaccatgctggcaccctgatctcagaactgcagccatcagaattgtgagaaaataatactctgtttaagtcacccagtaaatggtattttgtcatggcagtcaaagctgactaaggtattttaattttctttttttgggggggcgggggggcagggacggagtctcactctgttgccaggctggagtgcagtggcacgatcttggctcactgcaacctccgcttcccgagttcaggcaattctcctgcctcagcctctcaagtagctgagactacaggcgcccaccaccacacccagctaatttttttatatttttagtagagacggagtttcaccatgttggccaggatggccttgatctcctgaccttgtgatccgcctgccttggcctcccaaagtgctgggattacaagcttgagccaccgagcccagatggtattttaattatttttctgagtgtattttatgagagtggtgtttagaaaatgtggcacatatacaccatggaatactatgcagccataaaaaaggatgagttcatgtcctttgaaggtacatggatgaagctggaaaccatcattctcagcaaactaacacaggaacagaaaaccaaacaccacatgttctcactcataagtgggagctgaacaacgagaacacatggacacaaggaggggaacatcacacaccggggcctgttggagggttgggactggggagggatagcattaggataaatacctaacgtagtgataggttgatgagtgtagcaaaccaccatggcacatgcatacctatgtaacaaacctgcaagttctgcacatatatcccagaacttaaagtataaaaaaataataaaataaattgaaacatgctgatttaaataaacatttttctttcagtaatgccgaccagggaataaatcagatacgtgattgacatttgtttgacactgaatttggtcaaagaagagcatataaatttagcatattccaaacatataacaatattcttaatcttaatgattaagccttattactactgacattttggacttaacaagataggtgtgtggtatatgaaagtggttaatgttatttccaaattattcagttcctagtaccctaggagaacctaactgagaagggctaaagctaacttgagatgtcattttgatcccagatctactagctatgtagccttctttatttttcagtttcctcataggataaatagaggtaaaactcatttttcctgctacttacaaaaagtggttataaaaactaactaatagacgcaaaaaatagcgaaaaaatagaaacgcaaaacaaaatttaagatacaatggggagtgtattaatatattcaaggaaacttgaatctgtgctcccaggtgaaagaaagaaaaagatacaatgacagtaattaaaaaattatacaattagggaatatttgttatttcctcactttatagatgagacaataaatgctagtttaaaaagtgtaagacagggtattcgatgaaattattgtaatttttttctctaacattgtgaaattacagtggtaatctttcgaaactatataaattatttacatatgttaacattttaaaaattaagatggtaaaaccaatgtgtatccttaaaaagcaatccatcaggtataagggtgataattatacttacactgatctcactgatttactttcacgtttcaaggtaaagaaatgaaactttgctattgtatacatctgttgtttccaaaggctcatggtgctcactagagcagccttggtttcagaaagaataagtaagctctgttccatttcatcaaaagattttgaatccatttcttcctccagtggctgctgagtaaatacactataatctatttgccaaaacaaaacaaacatttcagtatgttcattaaaaaagatacaaactttctgaagcaggaacatttaaagaagcattggtctggcagttatgtggaacaaatggaactctcttatattctggcagtatctattaaagctgaacatatgtatatcttatgacccaagagatccccaacaggtataaacccaacagagatatgaatacaggtttcaccaaaacacatgtacaagaacatgagaatgttcttgttctactaagaacaagaacactattctatggaatagtgtaaaccaatgaaaatgaacaaactactgtacccataacaacatggctgaacttcacaaatgtcattttgagtgaaagaggacagatgcaaaggagacacatggtataattccactagttcaaaatcaaactggatacatatccatatttaagatcttattatctctgtatctgtataatatccaacttttatgtgaacttttcctctctgaccacaacttagcatcatatcctgatcatacacgagacttctctcttatcaccatgtttgagagtcctctcctggctttacattacttctcaattaaaatttagcctcaggctcagttttcagccaaattctgcccttcaacttcatctttagtctttggaaggtttaagagccaatgcctacttcaatataatttcctgggattactgaggttgtacatgatcaatgacagtgtgatcatacagattattagcacaacacttaaaaggtataacaaattcagtagtgtgaataaggtatgtcattcagatttcattttaatatttaatattcatttaaattacagttaaacattccaaatgtatttggaataaaaatttatttacgtactttatgttaaaattctagcatataaacagagccaaagacaaaaaccacatgattatctcaacagatgcagaaaaggcctttgacaaaattcaacaacccttcatgctaaaaactctcaataaattaggtattgatgggacatatctcaaaataataagagctatctatgacaaacccacagccaatatcatactgaatgggcaaaaactggaagcattccctttgaaaactggcacaagacagggatgccctctctcaccactcctattcaacatagtgttggaagttctggccagggcaattaggcaggagaaggaaataaagggtattcaattaggaaaagaggaagtcaaattgtccctgtttgcagatgacatgattgtatatctagaaaaccccatcgtctcagcccaaaatctccttcagctgataggcaacttcagcaaagtctcaggatacaaaatcaatgtgcaaaaatcacaagcattcctatacaccaacaacagacagagagccaaatcatgagtgaactcccattcacaattgcttcaaagagaataaaatacctaggaatccaacttacgagggatgtgaaggacctcttcaaggagaactacaaactgctgctcaaggaaataaaagaggatacaaacaaatggaagaacattccatgctcatgggtaggaagaaccaatatcgtgaaaatggccatactgcccaaggtaatttacagattcaatgccatccccatcaagctaccaatgcctttcttcacagaattggaaaaaactactttaaagttcatatggaaccaaaaaagagcccgcatcgccaagtcaatcctaagccaaaagaacaaagctggaggcatcacgctacctgacttcaaactatactacaaggccacagtaaccaaaacagcatggtactggtaccaaaacagagatatagatcaatggaacagaacagagccctcagaaataatgccgcatatctacaactatctgatctttgacaaacctgagaaaaacgagcaatggggaaaggattccctatttaataaatggtgctgggaaaactagctagccatatgtagaaagctgaaactggatcccttccttacaccttgtacaaaaatcaattcaagatggattaaagacttaaacgttagacctaaaaccataaaaaccctagaagaaaacctaggcattaccattcaggacataggcatggggaaggacttcctgtctaaaacaccaaaagcaatagcaacaaaagacaaaattgacaaatgggatctaattaaactaaagagcttctgcacagcaaaagaaactaccatcagagtgaacaggcaacctacaaaatgggagaaaatgttcgcaacctactcatctgacaaagggctaatatccagaatctacaatgaactcaaacaaatttacaagaaaaaaacaaacaaccccatcaaaaagtgggcaaaggacataaacagacacttctcaaaagaagacatttatgcagccaaaagacacatgaaaaaacgctcaccatcactggccattagggaaatgcaaatcaaaaccataatgagataccatctcacaccagttagaatggcaatcattaaaaagtcaggaaacaacaggtgctggagaggatatggagaaacaggaacacttttacactgttggtggcactgtaaactagttcaaccattgtggaagtcagtgtggcgattcctcagggatctagaactagaaataccatttgacccagccatcccattactgggtatatacccaaaggactataaatcatgctgctataaagacacatgcacacatatgtttattgtggcactattcacaatagcaaagacttggaaccaacccaaatgtccaacaatgatagactggattaagaaaatgtggcacatatacaccatggaatactatgcagccataaaaaatgatgagttcatgtcctttgtagggacatggatgaaattggaaatcatcattctcagtaaactattgcaagaacaaaaaaccaaacaccgcatattctcactcataggtgggaactgaacaatgagatcacatggacacaggaaggggaacatcacactgggcactattgtggggttgggggagcggggagggatagcattgggagatatacctaatgctagatgatgagttagtgggtgcagcacaccagcatggcacatgtatatgtatgtaactaacctgcacaatgtgcacatgtactctaaaacttaaagtataataataaaaaaaaataaaaataaataaataaaaaaataaaattctaccaattaaaccataaacatatatttatttaatggcaagaataaaatactacacaattgaggtttattttaaactcaaaaacattcagaactttcaacacagaaaaatattaacagttaatgcaaatattaaagagaatgtactagtgagataactttaggaagaacattataacttttgggccaatacatgtattttttaatttagataataatataaaaagaaatcagattatataatattaattttatgtagtggttcagtatattagtactcaagatattaaaacaaatttgggagacttgcttctttttttagttatttaattccattaaggccacgcactttcaatataaaagttttattgtggattcttccacaatttgtgagggtgaactaaaagcagaatgcccacttcatcatttaaaaatttcaaaagaaggagaaactacaaaatcacatacattaattttcagataaatcttctttgatccagacataataacaaaagaaaaattaagaactcaaaaatatatggcttctcctcactgcatttgaaagtgggcatctggtatcataaacgtaggactacaggagcaactttacagttagcaatgctgacaaattattgttcccacacaataaggccaatcttttaaaatttgactaccaaaccatgaataattaaattctagtaatattttaagttccagatttattttagcataatataagcaagtttacttcatgatgatatattcagcttgattcttgactttggtatcacaatgattttaatcatcacccactcggcattcatgcaaaatgtgtatttgcagcatctcaactcttttaacaactgtgaactaacatcctggtttcctttgctctcctcacctgccactacaaacattttgctaaccttcgatcataagaaagtttcctcaactcatgttcttaccgtaaactgaatagatccaccttgctccttactgcatcatgaaattgatctgtcaagatcaccactcttacagtctaccaaatccctcaccgtcctctgttaccaaaactaccttttttgtcctcatcttattcttcacagcaattgacaaataactgaccacttcctctttcctaaacaccatttttctaggtttttccatttccactctttcatgaaaaagtagagtaataattgctcattcacggtcagccctcttggctccttctccactgctcacccaggaggcttgcccctcaattcttatctacactccttacccaactaagagatttcatccaattccatagcaccatctacctgtgagtaacttccaaatctgtatcttcagccgtaacatcttcatttaactccagatgcatctcaaacaatatactcaaaattcatgcctcggccgggcgcagtggcttacacctgtaatcctagcactttgggaggccaaggcgggcggatcacctgaggtcagttcaagaccagcctggccaacatggcaaaaccctgtctctactaaaaaatacaacaactagctgggcgtggtggtgggcgcctgtaatcccagctgtttgggaggctgaggcagcaggagaatcacttggacttgggaggcggaggttgcagtgagccgggatggtgccactgcactccagcctgggtgacagagcaagactcaaaaaaaaaaaaaaaaaaggaaaaaactcatgcctgcattccttctttccacaaacctattcttcccctattttcaggaaatggcaatctcattcccagttatcaaaagcttaggaattattcttcattccaacttctcctgagcctctaacactcaatctatcagcaactcatcaccactaccaccagtataacccaaatatctgttctttccctttttttttttttttttttttttttaaacagggtctccttctgatgcccaggctagagtgcagtggtgcaatcatggctcactgcagccttgacctcctggcctcaggtgattctcccaccgcagcctctagagtagttgggactataggcacacactaccatacctggctaatttttgtgttttttgtgacaaggttttgccatgttgccaagactggtctggaactcctgggctcaagcgatctccctgccttggcctcccaaagtgctgggattataggcatgaaccactgcgcccggcctccctattttcactgacaccctagttcaagatagtattaactatagcagtttcctaactggtcttcctacttccacacttcctttataatactcttatcattcaacaaccagaacgtgtttttttaaaaattcaaatcagatcatggtacctatttgctttaaaactctctgatagcttccacactacaataggaaaacaaatgaaattgttttccagacgttcaaaggcagaacatgatctatccctttgagtatcctcctgactttgctgtgtaatagcttcactatggctccggccatggtagcctttttttatccctcaaagacatccaactcattcctcagttaatacctttgcagttgcagttctttatctgaaaatttctgccctaaaatcttcacctacttgatttttctcattatacaggcctcaggtcaagtatcatctcaacaaagtccttcctgatgatataatctaagttcgctgccttctaagaccaccccattatttcctgcattactcctatcactatcagtatctcattacttatttacttatttctaccctttattctaaaaaaaatataaaattacatttatataatttttgtcttattcaccatctgtctgattcattgcctaaaatgttttgttagttctgtttttacctgcttggtcaatttctgcttcaacttctagctttaaaaatacgtcttccaaagtcgtcatggaaacaccataagaaatgacacccaaatttgaatgactgtctagggcagaaaacaaacctaaaagaaaaaaatgaaagaatagtatatctttaagcatattatcataaattattgtaaaatatcctttaaaaataagttcatgaacagcctgtgaaacatatcatgacccatctctacaaaaaataaaaataaattagctaggcataaatactgatgcaagcctgtagtcttagctactcaggagactcaggtgggaggatcacttgagcccaggagtttgaggctgcagtgagctgtgattgtggcactgaactccagcctaagtaacaggcttaacattcttataaattaaggacctcaaagaaattttatatatgggaatatatctattatcatatctattaccatattatatctatatcatattataaactaacaaaaattttacagtatttgaaattaaaactgagaatgttactatattgaataataaaataaatatgtacattagaaaacatacagtaatcatttaaatacttattcatcttttaaaaaataaaaaagtaaacctattacgggttaacacaattttatttttaaaaactgcatcttttaaaacaaaaataatgagaagagaatattgttttacatttctgcaaatctctttaatgtctgtcttaacagaagacagatgggttctcatatttgtttctgtattcaatctgttgtgatagcacatattatgcagtctctggaaaacactgtataatcatgagaagctgagggtcaataaggcaaataacattttggtattattagaaaaagtgctgacattatgaattcccttaagaggtcttacggtccatcctacaggagatcccagaagacactgtgaaatccagtgaaataccgtgacaatttttcaaagaaatgtaagagtcaacaacaaagtatggtggtgaaaaccatgagttctggaactgatttgcctgggttcaaaactcagctccaccactttctacctgtgttaccttgggcaagttccttaaatctttttatgtctcagtttcttcatttgtaaaatgaaagcaataatagtatttatctcatgtatttcttgaaatattgggataatgaaataaactaataattgcaaaaggcacagaccagcatctggtagaaaataagcacatataaatgttactaaagaataggagataggtgggtataagtagatagaatgataggcagagtgcattaagttggcaagtgtacttcagtccacttaatttgtgatttctttttaaaaaaaaaacaagtatttttctgattatgagataaatgctatgaaaattctgcacaatgtacttacatcaataacatccttttgtctatcaagcaattcctaaacagaggaaggagactgagtttgagttcctcattaaaaaattaaaaaataatgcctcaattaaaagaattcaaggatttatcatataattcattatgaaatcatgaaactataaaagaacctgagaatgtatataaactatatacatatatgccttactctcaggaggcctacaagcaatttcttttttttcttgacaacaaagtaaacacaattatttttacgttttttaacattttcttaagtatttaatatattagttacagtttcttgcatggtgtttgtaaaaaaaaaaattttgctgtgttttttctggctttcaaaaacaaaataaagcagaaacagaatattaactctggccacctgggagcatggcaatactacatggagaaggaaacaaaaaggaaatcaatgaaacctattcccaatataggatcccagttcaaacaccaagagacttaaagtaagtaatacctgaaaatttgtccatgtccttgaaaggcaagctatacacaagttgttggtcattctgttgtaataaagtagctccaggtatatgttgtttaaccagtgaagaaagagattctgtggcacaatatttgtctatgtacatgctagagaataccaaaaatcacaattaatgattatacaataaacagccaaaagtaaattatgaaggctttaaattaaatttagtaccataaatgatggtcaaagcatataacagcaagcctccaacataataacagtatagcaagagtataatatagaataatgtcaataaaaatgaatgatacctcaggcggtagccgatcccccatttacttttgaggaacattgaagaaccaacacatttcagcattccttgtgatatcacagctttcctatctgcagataaatatttacatttcaatttctaaagtatcaacagcattaataattggcatttacattttatggtttctcatatgagagtcatccacattatgatatcattaatcatcacaaaaagtcttatgaggatggtactagattatcatcaactatttttcagatatgaatactaaggtaaaaagaaaatacattccttatatatgtttcatacagctattaagtaacaaagccaggaactctactcaaggagtctgactctagagtctacttaccatatgttattccaaatatatttttcctaaaaggcttaccaatacaagcactttcacaatttcctttataaccaaatgtagaaacaactccaaaaatcaacaaaagtaataagaagaacaaatgttagtttgttgggtttttaaaaataaaggtactactgaagacatgaatgacttgcccaattttattagattatattataagcagacagaagttgctcaagaatttcaaacttctatatctgtcatagctattaaaagtcatgtgttgacttcaacttggattctttatatgtatgtatgtgtataaaattgtgcagaaaagagttaacatagcaggtcagaggcttctatccttagaaaggcctgcttacaaggttggcccttggctgttagttgagaacttggatttgggagggttcctactattctcaaaacaggtaagagtggctcagtgcctaaactgtacaaacaatgtggtttatgccaaacaacttctttccttctgagaatctggaactttggtatgtgctaggcagaagatgtttatgtgatcagcacccaataagaatcttgaacactgagtatatactaactttcccaagtagatatttcacacatgttgttacaactcaatgctgaagaaattaaagcacatctgtctactccactgggagtaggactcttggaagcttctacctggtttcctcgagactttgcctcatataccttttccctttgctaacttagctttgtatccttttgctgtaataaatcatagtcatgagtatgactatgtgctgagtcatatgagttcttctaggacatcactaaacctgggatggtcttggagattctcaacacaaaaatgtatcattttaaaattttttagaactttttttgtgaaggaaacataccactaggtaaaagcttctctatttatacctcaggaattagcatctctatatccatcttccttttggcccatgatctcagccttcgaaaataaaacaaaaatctcacctgcaagaatgtcagcttcatccatgaaatgagtactgaacactgtcacccgattggcttttctgtattttaaaagattccatacaatatgtcgagaacaggggtccattccagctgttggttcatctagcagcagtatctgtgtgaaaagaggtgaagaagggcagggaatcctcagaaaaactaaatattaaacaggcatgtggacactaaaaaactgccccatttcaaattattattttcaatcagaaatatattagatcagattttttcattcataattgagttcacataaatttttaaaattataaatttgacatgtgaatattttcccaggtttaattctaaaagactgcctgtaatacacaagacaaaagtataacaacagtcagacaaacaaactaaaaacaaaacattaagtatattgctattatccttaacaattaaatttgtagatgtaacacttgcttttttggagaagaatatatggttttatagtagttcaagggaagcaatttgtttcaagactatttttaatataaaaaagaacatggtggtggtggctgagaggaagactaatgaacataaagccaggatccagaatcattccccagctgcaacagcaagggggaatgtggcaggatggtggggatcaataggagatcatcctagctgcatgcatgcacctgtcagttttgatgccctgtgtaaagtggtacatcagttgtttctctgtttctatgacagagaacagcataaaacaaatacatacaaaatcaaagcaggacagtgataaactgaatcactcctttgattttgttctatttcttaacttttgttattaactataacaaatattttttaaactatagagaacaagagagtaatactattatagctaccattccaattcagcaatgttattttttggccacattttcttcagatcattttttaaagaaataaaacatggaggccaggcgtggtggctcatgcctgtaatcccaacactttggaaggcaaaggcgggaggatcgcttgaggccagttcaagaccagcctgggcaacatagcaaggtctcgtctctacaaattaaaaaaaaaaagaagaaagaaagaaagaaagaaagaaagaaagaaaacatggcagtcataactaaagtctattcttccattctccttcctaaaagtaaccagttatcataaagatgttataactcagaaaggaaagggtggaagggggtgaggaataaaaaaaactacatattgagtaccatgtacagtactcaggagatgggtgcactaaaacctcagaatttaccactatataattcatccatgtaaccaaaaacctttagtaccttgacagctactaaaattaaaaaaagttatacatctttctgacttcacttttaaaatctcattactatgattatatccataataacatacagcattttatgtacacttaacctttacataatgtattatatctttctacaacctgctttttaattcgacataatttaaaatgagctcatctgtaaaagtaatatttatttacctttgggttcccaagaacagcaattcctaatgacagctttcttttttgaccaccacttaattttttagcttggttatctttgatagtctgcatgtctaaatctagtaaaaccttctgcacctgtaaaagtaaagcatgaacaatgttattttaaaaatcataccatttatataattatcaatattactttttaaatattttaagttttaatgtgttagatatttaagtaacataggtttttaaataattttaatatcaactttaaaaatgatcctttagcatggaactgcctttgacatatactcatatataattatgaaaacaacaggtaacaagattcttgagggaaaggttttaattttgtgccttcttgggtggtagggaaggaataagagatcactgtgatggctcttaatgtatgtgtggaagtgggagggggtagaggagatgagagcaagagaaggcaggaataaggcaggcaagcatcctccagatgaaacaaacttttatgtgtgctaaaacatttactccaaattctgtctaattctttgtaatagctttctgtttgctggctcagaacaagtgttatatttagattttcaagcatatttttattgcacaagtcattacaaaaggttattgattacaggaaataaaagtaaagatttctatatgaatagcatacttcttgtattatattgttggctggtatccctttgattgaagccaaaattgataaattttcttctactgtcaaaacatcaaagtgtatatctaactgtggacaaatgccaatcatttttcttgcttcaaacatttcatctatttctgagactctgtgtccatatatagatgcaaaccctaaaagcaaaatatatatttaaatgtacattaattattttataatgtgtatgttttcaagtatcctgataacttagttatttggttataacagacatataaggtaaaaattaatataaatttacaaggcacaacacacccttcaatattattggtgatccgcatccacttatatttcaatctcattttccatcacttacaggtcatataacatagtgggaaaagcaagaaagtaaaagcttgacactaaacataaatatctattgatacactatttacacttgtattccagtaacaattttctagacactgtgcaatagtggagggattaaagaactataaattttatcctaactagctgtgtggtcatggccaaattacttaatctctttaaattccagctttccttttttatacagtgaacactaatatattcattgttttaatagtgaaaattaaaacaatcatacattatgaagaatcatgaggaaaaatcataaattcttatacaaatgtaagatattatgactaccatcaaagagtgatacaactaaggacaaagaacaaaatcaaactaattttaaaagttaaataacatttaaagagttgaaatgcagattcaatacaattcagcccttttgtaaagtaaaatatttattgtactgccactctatttggttactgtcataatatggagctactataatgaattctcacctaccaaacaatcacatatcaaaattatacttttgaggtatgcctttaaaattctattttagaagatagtatgaacatttacaattatttcctgctgaactattgctgtatatttagatatttgtgtttattttctcaacctcaaatagtctatagttctgatttaatttccaataagttactcatttatcctcccttgaaaatgatgaataaaaacacatacatacacatctacgtgtgtatatgtatagaaatatgtacaaaattagatcctttttactttattaaacatgatagaatcatttttatcttctactaaaaacaaccacatgtgtataatcaagaaaaaaagaaaacacctttacagatacagaagttggtcccattgacaaaaattattcaatacacatttaaagaatatatataatgaagtttttttttctttaagacagaaaactcaccatcagaaggtgggcagagtccacaaagaatattcatcaatgtactctttcctgttccactgtggccaagtaaggcagtaatctgaccctcatatatgtcaaatgacaaatctagttcaggaaaaaagaagactcaaatgtaatttttatgtctgttcagctatgcatgataattcataatatttgagcaatcttcaaggcactatatctataaatacatatttaaagttaccagcatatttgatagcaggtaaaacagcttctttgttacagtcaacgatataaacagtaatgaaagtaaataaaaataaactttatttgttcatacagtaagatttaagagtatacaaaatatttgggaattttctgtgtcccaatttttgggaattaccaatggaaccaatggaattaaacaaaaatttgttcccaaggatatttataggcatttaaataaactggcaaaaaaacaagaaattaaccaatagcatagaaatggcttgaaaggttagatttaatgaagcaatatcactgaatggatatgtaaaggaatgaaggaagacaggagatggggacctgaaatgatgaagcagaaatggcttatcaaaaaactaggctggccaggcacagtggctcgtgcctgtaatcccaacactttgggaggctgaggtgggaggatcacttgggcccaggagttcgagactagcctgggcaacatggcgaaatcccgtctctacaaaaaatataaaaattagctgggcatggtggcacctgtagtcccagctactcggaaggctgaggtgggagaatcacctgagcttgggaagtcagggctatgataagccaagactgtgccactgtcctccagcctgggggacagagcaagaccctgtctcaaaaacaaacaaacaacaacaaaaactagactaagaaggctaacatataaaacaagaaggaaaaagtctcagatcctaacgccaataatctaagttaaaataagaaagggaactcaacaactaaacgttaagtgttctgccccatgaacgtggtatttctatttatttaaatcttctttaatttctctcagcaatgttttggacttatcaggatatgtcttttacatttttgtcttatttacctgtaagcatattttttgatgctaaatgctatttttaattttaatttccaattatgtgttggtaacatatagaaatacaattgatttttccattatttatcatgtatcctatcatcttgcaaaactcactgtttagttccactattattttttgtcaatctaaaagattttaaaaatagattattgtgtcaactgcaaataattttactgcatcctttccaatctggatgccttttatttcattctcttgcttctttgcattagaaacaattagttgtaattgttattacaattataattatacttaactagttgtaccaataacttacattggaggttatatataatctccaatgttgaataaaaagacgtgaaaagcactgtaaccataaaagaacagattcataaattggacttcattcaaattaagacttgtgtttgtcaaaagacactgctagtagaattaaaaggcaagcctcagactgagatcaaatatttaaatacctgtatctaacaaaggtcttgaaacaaaaatgtgaaaagaacttgaataggcatttcataaaggaaaacctccaaatgccaataatcatataaaaaggtgattaataacattagttattaggcaaatgcaaactaaaaccctattagtataccactatacctactttcttcttaataaattaatttgcctcctagaagacatttggtaaagactggagacatttttggttgttacaactgggagaggatgtttagcagtgtgccagggatgtttagcagcgtgtcagtcagtctccagaaccaacagaatacacacacacacacacacaatggagcaagtatgagtgtggggttgggggattagggaaggtttattttaagaaattgcttcagaagattgtggggtctagtaagtcccaaaaatctgtagggcaggttgaaaactcaggcaagagttaaagttgccatcttgggtccaaaattcataggctgacaggctggaaactcacgcaagaatctgtttcattcttgaggcagaactccttctctctttggtgatcaaagccagggatgctgcttgtgaaggttaattttatgggtccccctggctaggctatggtgccgttatttggtcaaatactgatgtagaagttgctgtagatgtcattaacttttataatcatctgagttaaacttgattagtcttgataataatggtaaaccttatccaatcagttgaaggccttaagagaaaaaacaggttccttggaagagtcctgcctcaagaatgtaacagactcctacatgagtgtgcagcctgtcagcctgtctacaaattttgagctcaagactgaaacttcaacacttgcctgagtttccaacctgccttacagatttctacatttaccagggcccactatctcatgaagtaattacttaaaacaaacctcccctaatcccccaccctacaatcatactggtgtgtgtgtgtgtgtgtgtgtgtgtgtgtgtgtgtgtgcgtgtgtgtgtgtttgtgtgtgtgtgtattctattggttctggggactgactaacacattgacacaatgctaaacattctacattaaagaacagttcttcacaacaaagaattatcaggaccaaaatgtcagtagtgctgaggttgaaaaaccctacgataggccaaatgaatttttcaaaaagtaactaacatgtattgcatatacatgcaaaataataaactgaaacaaggacatagccttattcaaataattgagtatttttcattttaatagatactacattttacttttacaaatgtcatgttgttagttttattttgaatattaatcacataaacgaaagtatctcaaaaaagcaagacaggggctgggcgcagtggctcatgcctgtaattccagcactttaggaggctgaggcgggcgaaccacctgaggtcaggagtttgagaccagcctggccaacttggtgaaaccccgtctccacaaaaatacaaaaattagctgggcatggtggcgtacacctgtaatcccacctactcaggaggctaaggcaggcgaatcacttgaacccagaaggcgcaggttgcagtgagccaagagaacgccactgcactataacctgggtgacagagcgagactccatctcaaaaaaaataaaataaaataaaagcaagacagaaaatcatggtagagaagtttaaatttcccacaagctatgcaaattatttttctagttgtactttaaatactatggcctgaatactaggaaaactacttacttctcaaagcctccacattttcacccttctttctgtatgtcttctgaataccactaattctgaaatataaagttttatattttaagtatttaaagcaatttataagtatgtgtgtttatttaccatgcatatttttatcaatgctatcacattttataagaataataaaataataataaagtactttcctactaaaacaatgaaccaaataatgttgataatgaaaatacaattgacacttgaaaacacaggttaggagtgccaactgccacacatagttgaaaatacacatataacatttttaatcccctaaaactaatctattaatagcctactattgataagaagtcttgcagataacataaaccgttgtttagcatatattttgtaggttttacatgttaaacactgtatttttatgaagtacactaaagaaaatgttaagaaattataaggaaaaaatatatatttacattattatactgtatttatcaatgccgtcagttcacatcatctatttataagatgaacaagatgcacagtctatctgaaatgacaggtaaccgcacccacagacctcaatctatggtacatacaagcaattcaactttttcttataatgtcatgacctttctctgcttcttgagagcacttccagcatcactagtggcaattcctatggatcccatgatgctattcaaggcttacggtattgcactacacataataaaaaataagcaagaaccctgagacattactttttatcatgatatgcaatttactggagagatgaacagctcacaaggagataattgagtcacatggcattcgaagtatatgcttggaacacacaagctcaccataacagcaaaagaaggtgctacaaaattattgcagtggtacagtaatactgtagttaatattatgcagctatgatttaatactgcatcttcacatttgtttacatttctctcaactgggcattggcataatgtaggtctgtcaatattgtgtacattaagctttgataaagcataacttactataatctgtgtatattttatggtagcaaatgttaaaatagactaatatctataaatattttatgcattcatgacatacctaacatttgtttttggtatttctaggctaacagttcatctgcgagttttttcaaattgttacaaatctccaaaaaaattttcaatatatttactgaaaaaaatccacatataagtgaactggtgtagttcaaacttgtatttttcagggatcaactataaaattattttaaagaaggtacaagagaaaagcatagtattcctttccattgtaagcgtcattgattcatttttcatgccaacccaacttctaaaactaagtgaagaatctgatttaagcaatttatggattttttttcatttctgattatcaaacacttgttacatcagtgaagggggatataaaccagatgtcatttcatgtcagcacaaatttcaaaccattaacaaatgtgaagtgattttcttattctaccttatttttttcatatttttttaaggaaatgatttgttaatcagttaaaatttaccgttaagaaagcaggccactggccaatgaattacatcttaagtattttgactttctctggaatttttacatttttcttaaatttaaaaaatattatgcttcacttttttatttcattttattttatttcttttctttcacctaattttatttctaaatttggtactgactgacctaacaaggaatcgtaatgaatttctttggttcttaaaaattaaagtaatgaaatgttctaattatgcctcaaaccctaaaaatctatgaaattaacagatgacaatttaatatgctgtataaaacaatgtagcatgaacaaaattatatagttaatatttatcatgtttcagtctacataatgggaaaagctttaaacattaattgtataaacatcaggttttattacttttaaaattttccatccaaacataaaatttcaggggacaggtgtggtggcttacgcctgtaatcccagcactttgggaggccgaggcaggtggatcacctgaggctacgaattcgagaccagtctggccaacatggtgaaaccctgtctctactaaaaatacaaaaattagccaggcatggtggcgcatgcctgtagactcaactacttgagaggttgaggcacaagaattgtttgaatctgggaggtggaggttacagtgagccgagattgtgccactgtgctccaggctgggcgacagagcgagattctgtctcaaaaaacagaaagaaagaaacataaaatttcaaacctagcaccaactttattctaaatggttgcaaagaaaataagaaaaagagaaaagtagcccttattaatgttttaaaatcatggcatatgtaccaaatctaatataccatatttacatacatatttaaagaataggatttaaatgtttcatcagcagttcttatacctaaattgccaaagattgaaccataccttatggcttcttttcctacaaattctgaagaaactggctcaataatttcactaaaactaatatttccattaacattgccctctgataactcctcataatttcttttgctctttgaccaatatgaaggcttcagaaaatataaagatgatctccgtaagccaaattcccctgaaaaataaacattaaaaaactgagttaccataattagtttttaaatcataaagacagcatttcaaacatatgacaacctgcatctaaagtttaggtaccattccgcaacatatatatatttccaaacatcatgttgtacacaataaatatatacaattttcatttgtcattgaaaagtaataagtaaataaagattagctgtattgtattaaatcaatattgtatgaatcaaagttttattgataaataattctagtccataaatagtttcagaattgctgagtgggaggtaaaggtgaataaagcacatcttctatgctaaaggaactaatgcctttatgagtacaagtagatagcaaatggcaagaacacaacacaggctgaatgtgttgaagacttgaatgggcaccatcttaaatgatctttgaaaataggtagtaactagaaaagtggatatgcttcatggaaaagactacagaattatggagagcaacaaaacaacaggatagaaatatgagacttagaaatggtatacaatgaggccaggcatggtggctctcacctataatcccaacactttggaaggcagaggctggcatattgcttgagcccaggagtttgagaccagcctgggcaatatggcaaaaccttgtctctgcaaaaaatacaaaaaattagtcagatgcggtggtgcatgcctgtagtcccagctacctgggaggctgaggcaaggggatcacttgagcccaggaggctgagcctgcagtgagctgtgatcgtgccactgcactccagcttggaagacacagcaaaaccctgtctcaaaaaagacacagcaaaaccctgtcggaaggaaggaaggtaggtaggaaggaaggaaggaaggaaggaaggaaggaaggaaggaaggaaggaaggaagggagggaggggaaagagaaagaaagagagagagaggaaggaaggaaggaaggaaggaaggaaggaaagaaggaaagaaagggcatacagtggtaactgcccagacaacatgttccattttctcccttttccctctcaaaatacctacactcctcatttttttcaaatatctactcttcttttagattggccacatttcaaagggatctgatgccaagtacagaggattccaattgattttatcagtacttggcattcctctgggaactgttactgctccaacagcaagcaaacaaaaacataaatgtagggaaaggacaccctatttaacaaatggtgctgggataattggcaagccacacgtagaagaatgaaactggatcctcatctctcaccctatacaaaaatcaactcaagatagataaaagacttaaatctaagacctgaaaccataaaaatttgagacgataacatcagaaaaaaggcaaagacttcatgaccaagaagccaaaagcaaatgcaacaaaaacaaagatagataggacttaattaaaccaaaaagcttctccatagcaaaagaaataatcagcagttgacagataacccacagagtgggagaaggtcttcactatatatatatgttgacaaaggactaacatctagaatctatgagtcactcaaatcagcaagaacaaaacgaacaatcccatcaaaaagtacgctaagaacatgaatagataactctaataagatatacaaatggccaagaaacatgaaaaaatgctcaacatcactaatgatcagggaaattcagatcaaaaccacaatgtgataccaccttactcctacgagaatggccattatcgaaacatcaaaaaataatagatgttggcatggatgtggtgaaaagggaacacttttccactgttggtgggaatgtaaactagtaaagccactatggaaagcagtgtggagattccttaaagaactaaggtaagtctaccgattgatccagcaatcccactcctgggcatctacccagaggaaaagaagtcattatgtgaaaaatatacttccccacacatgttgataacagtataattaattcacaattacaaaaatatggaaccaacctaaatgcccatcccaacaactggataaagaaaatgtgatacacacacacacacatacacacacacacacacacacacacacacaaaggaatcctactcatccataaaaaggaacaaaataatgccatttgcagcaacctggatggaaatggagaccattattctaagtaaagtaactcaggaatagaaaaccaaatattgtatgttctcactcataagtgggagctaagctatgaggacacaaagacataagaacgatacaatggattatgggggctcagggaaaaggtgggaggggggtgagggataaaagaatacacactgggtacagtgtacattgctagggtgacaggtgcaccaatatctcagaaattaacactaaaggacttattcatgtaaccaaacaccacctgttccccaaaaatctattaaaaaataataaaacctcaaaaaaaggggtgaagtgctcagacagacttgaggtatgtaactagatgagagatactgcaatggtctagactagtggtccccagcctttttggcaccagggactggttttgtgatagaaaatttttccacagacagggagcaaggatagtttcaggatgattcaaatgcattacatttattgtgaattttatttctattattattacattgtaatatataatgaaacaattatacaactcactataaggtagaatcagtgggagccctgagcttgtttttctgcaactaggcggtcccatctgggggtgatgggagacagtgacagatcatcaggcattagattctcataagaagcatgcaacctagatccttcacatgcgcggttcgcaatagggttcatactcctatgagaattgaatgctgccactgatctgacaggaggtggagctcaggtggtaatgcaagcaatgaggagcagctgtgaatacagatgaagcttcactcacatgcctcctactgtgcagcccagttcctcacaggcagctagtaagatctgtgtcctgggggttgggaacctctagtctagactagtattacacaatacaacttttataatggtcaaaatgttctacagaacatctagattgcaccatgcaatttagtaactaacagccatatatggctactgagcacttggaatgtggcctgtgctactgaaaaaaataaattgttaattgatttaattgtaatcaatttaaattttaaaagccacacatggctagtagttaccatacaggacagtacaggtgtagaatacagacacaggtaatgaggaatacaagtggaaaaggaaatatgctcaatacttaatattactattgaatctacaggagtttgctatattggctatagatgtggacaggagataaagaaaatggtaggagttacaagatcacttcatagttttagaccttagagggtaaaataaaatacttcaattaaaaaagactgatataaagaaggaccaaggtaagatcaactagagacttaaggctttcaaaactgctctctttttacacgatctctttatgttcactagtggctatagcctaaggtacaaaatatacttatttaaagtcaaattaaaagctttaacaatgaatatgacttagggtaccctggttaggaaaaaaaatcttaaaattaagctgaccctatgtgggcaaaaaagcctaaaaatctttaaagtaaaattcaaaaaccatctgcatacctggaatgacttgatcaagatagacagccaagaggacatagaatatactattaagtgtgagcatgataattgtaataattagaggatatgggcctgcagtcaaatttgaaaatgaagcaccttcattaaaatcttctaaatgcatgacctgaaaaatacaaacactaactttattacataaaaatgacaaaaacaagcaaaagctaacactacttaagagttatttagcatatccagagtgatagtaaccaactgggccttttaatagattaaacacttgaccaaattaataatataaatttataaggaaaacaataaagactttacaaaaatgtaagtttatcaaaccaattcctttcaatcatgtttttaatgttgtgcttctttaactgggatatattcactctaggggcatttaattccaatgtaattactaacaaatgaaataaaaacaaactgcaatattaataataacaaatgcaaacaaaagggttatgatccatatgaaagccaaacaaattaagtattagggaataaaattaggttagcatctttccaatagagaaaagcaagtattttgattaattaacacaattattaaagtattcatagtagatatttgtgatagcatggaaagagaaatgtactggaggttgaagcctcatttaggtcctagccctgccattaagtgaatacgctttaattatactattctaggcttcagtcctctcatttataaaatgaagaagataaattcaatgacactgaaaggccatcccactcacaacaaaaacctatgaatctataattcttcgttcctagagaacgcggactcggggactcaatgaactctcaaaatgtataacaatcattctcaggtctcaaaaaagtaaaatgattaactcaatatttaattatatctcataaatcagaacttctatccaaccaacatgagtaatttcttatatttagtaattacatttttttctttgtacattagccaaattcatgttccactacaaagccatttcttataagacttcttccatttagaacctaactactcctgtaaggactaataaaaataatatttgtaagtctgaatgttattttgaatgacaattccatgaagcctgggccaacaaaatccaccaggcctacttattccaccactacactcacggtaaatttgttctgctccacacacaattttctcccatgcattcttctgagataaatgtacaaatgatagcaatataaccaggccataggcaataagaattacttgacatttaaacacattactatcaaactgagtttctgcagtgaaataaatcactgagatacactgaagtaaaaagtaaaaaatttataaacagaacatttaactaaaaacttaaaattggacaaacataaataaaactagatataaaatatactctagaaatcatttcttcctcatgctaaaattttaaaataatttttttggtaaatcaaaggtagtattcatggtagtataagaagctacataaaacagaaagaaaatatttagtgaatgcaagattaatatattacctacctgtgcaataccaatcacaaaagtacagtgacagaaaggactgaaaagccacactaacgatttgggaaaactttctatgaggattatcataaggccaataaatccaaaagccacagtaacaaaaaattcaactattcccacatgttttgattttttaaaaagaggtgtcagcattaaagcaaaaaatacctataaaatacaaatattaaggttagtgcaatgttcatatataccagtatgaaaacaaaattaaagtttgcttctgaaagaacaagctattttcatgaaaaatgcattcataaaaatacaactataatttctaaatgctatggtattttattttcaaacaaatagtgatataccttttaaaaatttaaactaacaaatatttttgtgtttttgttttgattttgtttttgagacagggtcttgttctgtcaccctagctgaagtgcagtggtgccatcttggctcactgcaacctccacctcctgggttcaggtgatcctcccacctcagcctcccgtgtagctgggattacaggcgtggggcaccacgtccagcattttagtattttttttgtagagacagggtttcaccatgttgcccaggctggtctcaaactccttgcctcaagcaatcttcttgccttgcctcccaaagtgctgggattacgggtgtgagccaccacatctggtcttaaactaacaaatattaaatactgtatttttatctgtatcataggtaaacatgaccacctctacattacagaaaccataaatagccatgtgtttctgcagtaagatgcataaaatatgtgaaaaaataataaatcaacaaaaattttaagtacaagacccatattttaaacttaatttattcataagataaaaaaaacagtttaaaaagaaaaaaaaaaccagaaggcctgctgcagtggctcgctcatgtaatcccagcactttgggaggccaaggcaagtggatcacttgagcccaggagttcaagaccaaacttggacacttaggaagacctcgactctaaaaaaaaaaaaaaaaaaaaaaaaaaatatatatatatatatatatatacatacatatatatatatgtatatatatatatacatacatatatatatgtatatatatatatacatatatacatacacacacacaaaaattagcaaggtgtgatggcacacacctgtagtcccagctactcaggaggctgaggttgaaggattgagcctgggaggtcaaggctgcagtgagccatgagtgtgccactgcactccagcctgggccacagagcaagaccctgtctcaaaaaagtaaaattaaacatttaaaaaaaaaccaggcaattacatatggaagtatgttagttatttgcaatttattattttaaagagcagaaatgatagccaaaacatttaacaactgatacagggtgggcacataaaccaatcagaatggaagatggaaccacttaaaacaaaggctggtcattaaaacctctcattcagccaatatatcaaatgaatatcaagactgctaaagagttacatttgcaaagatgtatctttaaaaatcatcatcctggagcataaattaacttgaaagagtaaggattccatgaagacaaacaaaaatagtccaatacttgacagtcttaattatatacatcattatataaagacaacagatagaggagttgtatgtgaaatacatcatatgacaaaagctaaatctaaatctaaaactattttgtaacattactaaaaatacaggaatacagtgatgccacatcatttatttattaagtcacttatcaattagtaaaatctgtctttcatggcaaattgactataagtaaactgaagaaaaagactttgctatgttatcaaacattttgacagttctttattcctatcacaagttaaaatacttacagatgataatccataaaggaaaaaaagcagaaatatcacaatgctgctactttgaggaaataacaaagaagctgtcgcaatgactgccataagaagggacataagaaaaattaaacttgtatatagaagaacccaggaaagcctaaaatgagaatacagatatagttatggtcaaatgcataggcttaaccagttaaaaaatcattttaaacaaaatttttagattttagccattttattcttaaaattaagtcactgttcatttctgtgtatgcttatgtactaaaaattaatagtcttgtaagtaattaaaaatagtattggttaagtgataggtaaaagtgtaatctgataaaaaatactatcttccagagttaaaaaagctttcaaaatgaatagtaattcataattaatttaaatctaatattctcaaaagttcaatagcacacaatgtctctgattttcttaaaatgtaggagtttaatgagtcaagataacaattttctttatggcatgtgctacaattaaacctctgatggcttctgtaactataaacaataaaggctaccttacctcactaatcaatgacataattactacaattacacaatgtgaaatcaacaagatcagtaatgaattcactatttttgctcaagacttctttacaaatcagagctcaatggaattgctgcagtattaagttttattttacatatttttccaagttagctcaggatttaatgatgtcatgaaatcactgagttaaggctaaaaaggtagcgaaattatcaaaattgaatccatcattttactgaggcaaaactgagaccctgagagaatgatttgcctaaattcttccagctaccggttctccataaaatactttaataacccaataaattttaaaaaccaatcctttggccaggcacagtggctcatgcctgtaatcccagcactttgggaggccaagatgagaggatcacttgaggccaagactttgagaccagcctgcacaacatggcgagacccccgtccctacaaaaaaattgaaaattagttgggcatgacagcatgcacctgtagtcccaactacttgagagactgagatgggagaatctcttgagcctgggagtttgaggccacagtgacccatgatcatgccactatactccagcctaggtgacagagcaagaccctgtctcaaaaaataatccaaaaccaataatttctaaaataacaaatgaaagaaaaacaagcaaaggaaatatgttatatacaataattccattatgtaaagtgttaatgattaattgttacattgggctaattggaataaaattttgtaaaacagactataacagctcacatgcacagtattaaccttccccccagaatgaacttcattacatagtgaaaagagtaaggaaactacacttagatttataaaaatgcatgcctttgtaaaattatcactgtacaaaaatgctgatacattaaaggtcactagtgaaaacatggttttctcatttctttctctaaaattatttccatattcatcttaattcacccaaataactaaaactttcgagggaaaaaaagtccatataccacatatacagactttaatcactataactaaatttttaatattatatatatgctatattatggaagaactgtaacaagcaattaatttctaatgttccaagatttcacatttcctgaactctgaaatacacagaaatatacgtggagtatattgaaatacactgaaatatacacggagtgtgcccatgattcaaataaaatgtgaaataaaatttaaacacgtattgtcaacacaagctttgacattcttcatcccttatgttaaatgaagccaattagttgttgaaacttcttgactaatctcaaattccaagactaaggcaatcattgtaagaaaacaggataagcacatcatcaagttaggtaaatatcaaaattacaattttgaaaatctgtatatttaatacaatttttaattatattaagtaataaatttttaataacataccaaaaggcagtatcatgaagtcccattatctttaaaaattcttttatttttttttctttttctgctacgatatgaattgccaaaaagtatccaaaaggtgaaaatgctataactaggtatattaaaattactcctcggggaaaggtatctatttctacaacagcagtttctcccataataacagctttagttgactccagctccttccaaagagaaacattggtcttcaactataattagaaaatgtaaatacatcaaattaatttagttatgatagcagcccctagtaaaacgggacagctatatccctaaatttggtcagtaacctagtacaaatacaatcctcaaaaagctccatacctgaaataaagtgagtgaccccaatatcataattctgagtagaatattgcattcaatttattctaaaagtataccataaagtttaaagtttaaagtcagtaagtgtataaattttgattaaataatttgtcaaataaaataaaattgcacaattatcatcttaagcagacaattatatgtatcttagtaaaaatatacatcttcaaaatttaggaatttaggagtgattattagtgccatcattcctatgattgtttaaaaaatgttcttctaaataccatgcccttctactgctttaaagtctatatatttagcacatatagaccaaataataaaactatttatgccacataatacttctaacattccaattaatgcctaaattgaaatctatcctgcctattcatccagtgtggtctgtgctgtggatggctaaaaactttggccaaaatacaaataggtgatacaacatcatcaatgtaatagatccgtatttcactatctttaccttaaatttctgtattattgaatttgtgcaatattacacgtccctaatatgtttatactgtactacaaaagtttacaagacaattatacataaatcatctcatttggttcttacgacaatgctgtcaagtaaagtactattataatagtcattttactacatagcagtgtaacaacagagacaagactcctgttcagattttgattccagctccatcattattcatacatactttaaacgtattgtttagcagacaagatggttgatatacattttgaaattacaatattttgtagcatagtaaattttgtagcatagtaaattcaattagaaagggcaaatggaaaaaaaagccacagatccatacagaacatggaagaatgaaatatggttaatttgaatagtttgaattctaaggtaacttcatctactgttatctagcccagacacaaaagtaagatttttaaaaataaatttcatggccagtttttctgctaaaatatgaaacacaacaaaaagtaccaaatcagaaaatatgacttttttatcttttttctcaaaggagttgtagtaggttacatattttgtacatttgacagtagtcaaaccaaatactattgtaaagaataaggaaatatttattttaaaatggcatagtttttgtatttcttcctttatcatatttacctgtataatggcagcatctatggatgcttgtaaaactgtgaaacctgaggaccagtactgagcagcctcacatgattttgaacagccagctatggggggaagaatatgagatctaagattctgtacaacatgcaagtgcatcgttttaaagatattatatggagagatacctaccaaaacaatataatcaatcaatctttacaggaccaaagaaataagctactgactttcaaaggtaaacaatacttacaagatttctgatcatttacttgaaattttgaaataaaagttatatgtgttagaatactaaatagtaaatgaataaaaatgtaaagaaagaaattaattgtagttatttaaaacaagttacttttttgttttaaagtaaatcattctacatgacttagctctaaagcacttccagaagcaaggaaaagtcaaagttaagcaaacaggaaaaaagaattttcagaagggctttttgaaataaagtcacaaattcagtatttagcatagtgactttaacattgctcaataaatgtttgtggttgataatatttcttcatagatttaaacaaccaaaggttgtttcccatgtttcaaatataaaactaatcaagttcactagtagaagacctcaagattttaaagatttgtacataccacaagtaaaaacaattacatgaaaaaaagagatttagaaagtcatataacccaaaatgcaattttgctttatgctactgtatttaatatatataaatgtattaaatcaaaatgggtatatataaaaatgttttatgtgtagaagtagataggtatttataaataaatatttttatgctatacttctcagttttcctattggaacaagtaagaatagttgaaaatgccaatattgaactatataaaattttgactatgaactgcaagcagcaaagatatgcatttaattgatcttcaatgattatgtagggctatttacctcttgaatccatataaatagaagatactggaatcatatcaggaaaaaaacgaagttcataggacatggagtctttgaaaaccacacctacaaagttgctcggcttagagagactggatgttaacatttctttttcatttgtatattcttcagtaattatgactgtaagatatcataacaatatagttagctcacaaattaaaataccacaatacagtagatcaagtttacaattattttgatgaatggaatattttataaacacttttgctatatttacttcttaaaaaatgaaaacagtccaagcacagtggctcacacctgtaatcccaacattttggaagaccaagatgggaggattgcttgagctcagaagttcaagtccaacctgggcaacatggtgaggttctgtctccaaaaaataaaaaaattagccaggtgtagtgatgtgtgcctgcacttccagctacttgggaggcggaggtgggaggatcatttgagctaggaggtcgaggctgcagtgagccataactgagcaactgcactccagcttaggcaacagagtgagaccatgtctcaaaaaaaacaaacaaacaaaaagaagacaattcttccaacaaaataataataataaaatggtacaatgttgcagacactactcagctgtcatttgattacagaaatgtgtcagtgttatacttatgttataaatatatgaaatatagtataaaacaatatgcagaactcatatttcttcaagaaattgctgtttctcaaaacctcaattaattatactaatttcaggcagcaataaaattataaaaattattagtaatgcagttcatttatctatctcgaagttaaactaaaaaataacttcgttattttattttatatttttttagagacagggctttgttctgttacccagcctgcagtgcactggatcttgcactcaaacttcaggggtcaagagatcctcccacctcagcttctggagtagagcttggtcgatagtcactcatcaccatgcctggctaattttttgtttttaattttggtagaaatgaggtgtcactacattacccaagctggtcttgaactcctggcctcaagtgatcctcccacctgagcctccggactagttgggattacaggcatgagccagtgcacctgcacaaaaataactttttagtaaatatatgaattttttatttttaaatatttcttataaagaaaattccacaatccttctcagaaactaaataggcattttagtaactatgacacaactcctccttaaataaaaattgtcattcaaatccaatattgcttgttcctttcttagaagataagtggaaaaaatactgtaatcattctttctcatcagataagactaatttttaaatattttcttgtagttttgtttacaagcaactaattttcactacagaagcttcaaacatgtggtgaaatggaaagaatatagaattagtacttaacgtcttcatgtattaactgtgtgagcacagacaggcgatttgaactcttcagactttagtgtcctcatctacaatgcctagctgatgacactgggttgttgtgaagaacaagtgaagtaacaaacatcaaaacgctttgtaggctggatgtggtgcctcacacctataatgccagcactttggaaggtggaggcaggtagattgcttgagtccaggagtagattgcttgagaccagcctaggtagcatggcgaaaccctgtctctacaaaaaatacaaaaattagccaggtgtggtggtgtgcacctgtagtcccagctactcaggaggctgaagcgggagtatcacttgagcccaggaggcagaggctgcagtgagctgagatcacagcactgcaaaccagcttgacagtgagatcccatctcaaacaaaagaagaaaaagacaaaaaaaaaatgcttcatagattctaaagtattacttaaatgttaattaatagattttccaggccttttaagagggacagggaactccaggatttacatgaataaagagggtgttagttcaacatcctaccagtcatgttatgtatgtatgcataacccattttcagatagttctgttgttaaaaatacagaagtctaaaaaaatttgtgtatatgtatacactattttggcatctaatacacactgacttagttgttttttgtttgtttgttctttttttgttttgttttttgtttttgagatattgagtgttgctctgtcgccaggcttgagtgcagtggtacaatctcagctcactgcaacctccgcctcccgggttcaagcaattctcctgcctcaacctcccaagtagctgggactacaggcacccaccaccatggctggataatttttttgtatttttagtagagacagggtttcaccatgttggccagtctggtctcaaacccctgacctcaggtgatctgctcacctcggcctcccaaagtgctgggattacaggcgtgagtcaccatgcctggcctcatatttctttggtttatattctttcctcctactcagaattaccaatgaatttcatttcaacatttttaatcagctttttgagcttgtacactaaattctcatggtaatctatactacttgtacctaatatgatacactaccatataacaagaagtgtatttaatcaaaatattaaatagaaatagccagagaaagaaaccaatggaataaaagttacctggcttctgactgtataattaacactttccattcaatgacataaaatccaataatgcgatgacatataagctaattacaactatcccatatggcaaaaaataacatgctaatctgtcattttctacaatttagcacttccttgtttaatcattaatagcataagaatttctgtcactttctccagcttttgctttaggttctctcacagccactttaagttcagtggcacttcactgcttacactgttttctagttcatttctttgtgagaagtgcacattgagaaaaaagacttaggtggcactttaggtggaggccaagggaggaagatcatttgatcccaggagtttagaccaacctgggcaacatagcaagatcccatctctacaaaaaatatatatataaataaataaaacagagttagggacttagccatagtcatagttgtagtctccaaagttaggtacttcttcagtttacaccatacacttctataaacaagcatggtaagctgaaaaggtgactgctttacagtctttatcacatatttctagcttcctttttaaattttttattgttatagatgggggtcccattctgttgcccagagtaaggagtgctggaatgaagtggcatgatcatagttcactgcagccccaaacttttgggctcacgggatccccccacctcaacttcttgagtagctgggactacaggcacatgctaccacattcagctaaacattgctagcttcataattatatgaaagtcagaatcaaaatgaaatagcccatcaaagcttgtatcttatacaagtatacttaaactattttataaatggtctaagaattaaatataaaagtacataaaatatgcttcctaccaccaagaatataaattaatgtttcacaagaaaaataaggcaacagaattaaataattttagtatttttataaaactgactttggtggaggaacacatctctaagtgttaagactgctattcattcaataaagcaagctgataaatattgaaaaggcttaatattataaacagaatatatatataagctcacaataccatcaggtagatgatcagtagacactttctgcatgatgctgcttgtaatattagtcactggagtatatccaagaattagattagaaagagtaaacttgtccataggattgagttctatattaggcacttcttcatatttcttatttggatgcatcatgctaattaatattaaccaaaataaaaaaaatagtggaaaaagaatttcctacaataaaagaaacaaagtaattacaaagtataacaatggcagcaaaaatcatcaagatttcttggcaaataatataatactaagaaaaaacaggaaatttggttgtcctttcttatgaataaaataaaagcaattctatcccaaaagaattttgtgttgaacacctcatccaacccaacatgcatattattttttcctttgtatttagttttactgaaatattttaaaattcaagtcacaaaataaattaaggtgacataaaagataatatttaaacatcttagattattgacataaaacataataaatttactcatataattttatctaaagcaatttaccgaacatccctatatggattcaccataaaaatgcctttattcaattctgaattagaaatcatactttaattatacctaaatgtatactaccaaaaccatactgaattaaattctacggtcagttttagtagaaatgagctattatatcatcttgctgtttaattgttttaccagtttcagggaagatgaataatatgttttcatcctttgaaattattactagctggttacccaagttcttcctttcttttacccttatcaaaagtaatgtatgctgtgggtacaaatctgtgtcataatattaatactcatgggcaactcaatctagagtccataaaatacgaggttgtgggatataaaactctggaatcaaagttattgtggaatgttagttcatgaaacttaggaaacacatgcctaaaagctgaaaatgaagcacagatgttagaaattaactaaatgtagaaattattattaaaatttttaacatttagaaagcattaagtaattcagttatttttctgtggctaacatggcaagcttttactttacaagcaaagaaaaataaaattataataaaaatatatttagcaaaataaatcatcacttcaagatagaatatatcaagcaaaataaactgcaaaaaagcataagaaagagttatttaacttacctgaacactactctttttggttctgcatttaattaagtaattcttcagtagaagtgttctggtctgtctccaaactcctacctccctaattgcagtggacatgttttctgaataaacctattaaagaggaaaaacaaacaaacaaacccggagccacgcagtaaactgcatgtaatttttaacggcaaaataagcagctgtttcagtcccaggtaagatggattaagcatactccaagctgtctctcttaggaaactggacagaatgcatggagcagcaatctgtcagctctgaaaagtaaacaaggcatgtgaaatagggtagaccagaatttgaaataccaccatatcaacagtggtactttttctcctttggtatctcccgaaccgcccacagaggcagctccagaagaagccttagctttgaattgaggaatgggcaagggaagtcttaatgctcagggagaatgtagaaatagcaaatctttttttcttttctgaattctcctgtatccccacatgcaagcaatcccatggtaacagggccagactacagtaacaaaagcctagtgcagccaacactctgaggcaggaaaacctttctctctattcaatggaactatcgttgtaagaggatgaggccaatcccttttgcttttcttctctacctcctaccattgggccctggatatggtggttgcagctgcacaagtgtgtaacacaatggagaaaataaacactagctctctggctggaggatagaaacagcagccacagggaagcaaaaagtagaagggggaacaaatagaaagagagctcaggaaagcactctaaaaagttgtttttaattcctgtaataattcccaagctggacatacataaatccaatcctattagtgtgacaaaggcttgagaaactgaactaacagacagaccactgtccaaatccagactgttcactgcaaggcacacacaagacagaccaaaaaggtactgcaaaagtttttgaaaaataaactaaaatgacaactacagttcaaagaatgtgggtagaaacttatgacctgaacctaacctggttgacagcctgctaagagaaaatatcaacattttctgtaggtattaacacaaaacccaaagtctcatacaatccaatattacactgcaaatgaagcatgtagaaaatagctgaccgggtgcggtggctcacgcctgtaatcccagcactttgggaggccaaggtgggcagatcacgaagtcaggagtttgagaccagcctgaccaacatggtgaaaccctgtctctactaaaaatataaaaattagctgggtgtggtggcacacacctgtaatcccagctactcaggaggctgaggcaggagatctgcttgaacccgggaggcggaggttgcagtgagccaagattgcaccgcttcacaccagcctgggtgacagagcaaggatccgcctcaaaaaaaaaaaaaaatagcaactctactaagaaaataaaatcaaagataccaatgctgaaataacacagactttgaaattatctgataaaacttttaaagcagctatttaagggcttcagcaaacaatcgaaagtactcttgaaagcaatgaaaaatagaaaatcttagcaaagaaacaagacattaagcagaatcaaatggaaattttagaacacaaaaacacaataagaaataaatacaaatggaaactttagaacagaaaaacacaataataaataaaactcatggagtggctcaaaatcagaatgaacacaacagaaaaaaagtcaggaaacttgaagattatcaataggcattatccaatctgaacaacagagagaaaaaagatttttaaaaaattaacagtgcttcagaaaactgtgagacagtctgggcacactggcttacgcccataatcccaacactttgggaggccaaggcagacagatcacctgaggtcaggagttcaagaccagcctggccaacatggtaaaaccccatctctactaaaaatacaaaaattagccaggtgtggtggtgggcgcctgtaatcccagctactggggaggcaaaagaatcgcttgaacccagtaggaggaggttgcagtgagcccagattgttccactgcaccccaacctgggtgacaaagtgaggccctgtctcaaagaaaaaaaaaaagaagaaaaaagaaaactataggacaataacaaaaagtctaactttcatattatcagatttataaaaggagaggagaaagagtattaatgctaaaaaaaaaaaaaaaaaattaaagacttaatggctgaaaacttccaatttagcaagggatataaacacataagtttcaagaaagttggtgaagcccagaaaacataaagaaaatccatgcctatacacattataattagactgctgaaaattaagacaacaaaaaatcttgaaagcagtcagagaacaatgatgtattacctacagagagtaacaatttgaatgagagcagacttctcataagaaactgcggagaaagtggaatacattactggcgggaaagcaaatggttcagatgctgagaaaaacagttttactatatgacctcacaattccactcctaggtatacacccaaaagaaatgaacataaggactcaattgagtacatgttcacacacgttcacagtagtgctattcagaatagcagaaaggtagaaacagcccaaatacttaccgacagataaatgaacaaactgtggcatatacatacaattattattcagccatagaaaggaatgaagtggctaggtgcagtggctcatgcctgtattcccagcactttgggaagccaaggcgggtggatcacttgaggtcaggggtttgagaccagcttggccaacatggcaaaaccccgtctctactaaaaaaaaatatacaaaaattagctgggcatggtggtacgttcctgtaactccagctactcaggaagccgaggcagaattgcttaaatctgggaggcagaggttgcagtgagctgagattgcaccactgcattccagcctgggcatcagagcaagactctgtctcaaaaaaaaaaaaaaaaaaaaaaaggaatgaagtactgctatatgctacaattaaaatgaacatacaaaacgttatgtcaagtgaaagtcagactaaaaatgtcaaatgttatatgattccctttataggaaacttccagaaaagataaatgtagggacagaatgccaactggtgattgtcagaggccagggagagtaaagaatgaggagaaactgcttacaaggtaaggagttttaccttggaaataaattttaccttaataaattacttcaaaaaataacattgaatgatctaaatcattgtacctatcacaggtccagtatccctcttccagggtacatttaccctttgaagatccttgaaatcctttctgcctgtggacctctattggagctatctcgattcttcagaggtttcattccagctgaactcaaaatagaagtggtcagagtctcaactgcaatgtccactgcccctattcaaatacactcaacccagtaacctaggatctctgcatactaagaagtattgagaagatagcaggggaaataacaacaacaacaaaaaaatcctgttaaaccttccagagaaattgctgtgcccttgttttaaataaacctatctagtgaggccactgctataactctcctccaaaacaaggaccatctgttgcaagctggaagactgtctacacctaaataaagaaaactcacaatttttttttttttttgagatggagtctcactcttttgtccaggctggagtgcaatggcacagtctcggctcctgggttcaagcaattctccaacctcagcctcccaagtaactgggattacaggcgcctgccaccatgctcagctaatttttgtatttttagtagagatgggatttcaccatgttggtcagactggtctcaaacttctgacctcaggtgatccatctgcctttgcctcccaaagtgctgggattacaggagtgagccaccgtgcctggtccataatttttgagaggcagtttgtcttttccagtaaatatatataattaaagtttggcttaaatgagcatcttctttatatgcacagaaggaagactggaaagaactgtttaaattagcaatggaattaaagacaacttttattttcttcatgctttttttctatgtattacttacatagtaaaaaaaaagcaattaaacaattagacatactgtaaaaatactaaatgagtaaattaaaaacagcaaaacaaaagcagtcaagaatagaagatacattaaaataaattcttccagcattccattccaaggcatctgtgaacctgtggagtagacaccatgagcaaagcttacactcccgagttgaaaaaattgatggacaaaaagttatcattgaaaattaaatggtggcagacatgtccaaggaatattgtggggatttgatccctttatgaatcttgtgatagattaatgtgtggagatggcaactagtgggcaacagaacaatattggaatggtggtaatgcgatgtaatggcatcatcatgttagaagccttggaacaagtataaataatggctgttcagcagaaaaacccatgtctccctctcaaaagggcctgttttactatgatgtaaaaattaagtcatgtatattttcatattagactctgttaaataaacttctgtaatggtcaataaataaattcttctaacagtctcaactatgttatatcacatttagcaaagagttgataataggagggaaggaaggaagaaagctgtactcattcaagcattatttgctacaatacaaacatagaaacactaacctaatgcagcatgaacattctcaagttacttgccaaaacacattgattttgtgaatgctactaaattattaatccactttgaatgttggatgcttaactcttcatttttatataacagactcatagagtagatggattcacagaattttttgtttttttgagaactgcttcctgaactcaaggttgagtctctaagggccttgtctaaaaaacctgcccacccactccacctctcatcacagctttttaaagcaaaactaaaccaactccccaaacaccatcccaacgcacacaaaccatcaccaccaccaccactactcttgagctgtgtcagttaaaatttctcttggcagaattaactaagagacccacagactggatggaagtcaaggaaactgaattacatgaatggcaacatttaagaaagaaagtttacacattcttactctaagctttcttctaatgtaccacacctactgtgctcacaactcgatttttcttccttggagtatgtgaaatgtcctattatcttcccaatatattttcattttcacttaagctaaccagtatcagattctatttcttgcaaaaaagcatcttaaccaatattacaaaggcaccaaaattaacaaacataagaactaataatgcccaaagtagtataggttaagagtatgacctctgaagccaaaccaactaaacatgaatcctgcctctgctacatactaacttcaagaccttgggcaagttatttaatgtttttgcgcctaagttttattatctgtaaaatacaacaatagtagtacctacctctttgggttgttaaaatgactaaaagaattaatacatgaaaagctgaaaatggtggcttgtacatggcaactaattatacacattgatcacgattgtgtataaaagtataactaatatccttaaaagagtaatagagaatatcatattcttggaacaagagaaagataattaagaaaaaagcaattacagaacttagaaatgaaataaaaaactgatagaaataaaaaagcactaaaagatggggtgaacttcatttaaagacgaattagtgagctaaattgaagcgtgagtcaaagaaaccctacagaatgaattgcaaaaggacagagagaaaaaaatgatgaaagtattaactctgtcatcaaattataccaatgactcagtattatgaatgacctcaacaatctgatttttcttatactcaaaagctttagtctaatcatatgaaaatattaactttcaataatcttgagcttcaattcaagttattgaaacaaaaaaaaaatctcttaagcccatctgatcactggttttcttcatagtatgaaatacatggtttagctgtttgattgaaaagaatgaaacattcttaacattaattcttcataaacctttaaactttaacgttgatctaaaacagaaacttcaaagctatagtcaggtctttgtaaactaacccaacaacgtacctattcaccctcctctttgcctgctgcatcctccaacctgccagtccacagtgtctaagcaggcccaatttgaaaagggatatggcgaataaataagcaaggactggtctgcataataatgtaaacactaactctaccctataaattctttgcaaatgatgaggtgctggggaaaatatttggcttccttttcaggtgtcgagaccacattgtctctcgacaattggtcgagagattatacctgtcctttggggagaagacagagaaacaagatagaataaaaaaaggggtgattacaactctcactgatatggtaatcacaaaggcccctctcttcaccacatcctccactgttttgcagggtctggaatcccaaaggacaatactgactagcctaacagggagttagggtgggaaaactgggatgaaggaagaatgtgggaaggcagtacttttctatattgacgaacacccaaaactaaagggttaatatcttgagatgggaacaactcttgtggatgaaagaatgaggtttccagaaagaaaggtggagatccacacagcagaggtgacatgaaagcggtgttcctgacagaagcatatatctgaaaacagggctgcaaagttacaaatgaggcatgaccaaaaaggggacatctatgaagggtttgacttatcaggtgccttttcttgggatacaagaaaccccgtatttagcatggagctatacatttcctctttctatactagaattccaaaattttatagctttatgtgatggtttttggaagaataagagaaaaacgcagtaaaaagatgcatggcctgcctcaagtttaactgtttaagtttaattgcctctaaatggcaatatctaggagttcactcactagcagctgagttaatacaagaccaaagcagaatttgtatggttccaactcaaaatcttaccaatgaaatactttaaaacactctttaacaaagccaattcttagctgttaaaaaacagtggcacaaagagaaatacgggttcaaaatctaaaaaaaaaaagttattttccatacttccacagcatacctgagaaatgtgctaagtttgttgtagggctttaaataataattaggtgagttttaaacacctaacatctctaaagatttaatcaaatttaactttcctagataaataatttactagataaaataatttatactaaatccaataagttgcaagaaaatggaaagcctactaaagcccatcttccttttctaatgtattaattgacttaaagaccaggagttgcataatccaaagttcaatatcaaaaattcacttcttaatttatcttaaagtactggttactacggccaggcacagtggttcacgcctgtaatcccagcactttgggaggctgaggcgggaagatcacgaggtcaggagacagaaactatcccggccaacatggtgaaaccctgtctctactaaaaatacaaaaattagctgggtgtggtggcgggcacctgtaatcccagctactcaggaggctgaggcaggagaatcactcgaacccgggaggtgaaagttgcagtcagctgacactgtgccaatccagcctggcaacagagcaagattccgtctcaaaaaaaaaaaaaaaaaaaaaaaagtgctggttactacgttccaagtcctacgaaacatattccacatcactaaaagtaataaaaatgtacataacctttagaaataattgttagagaaaaattatttaggatgcatgaatttaattaattaaaataagaaatttgaaagctataaagtattttttaaaatctaaggtagttctactattatacctactgcctttgttaaaagcagtgctttccttagaagagcctctctcttcccccacctcccccgcaaaatccatcacttatctaatgataccattatctccttcaaatattttcagctagtaaaacaactcactgcacagcagaggaggtactaaatacctgtggaataaacaatccatttattatgtagcaggtaaaataactttaaattttttaaattattttcatagagacctgattaaaaacatatccatgtttatttctgtgagaaacaaattaagattataccctataaaataaataagttgagtcatcctgatgtttagagccatcctgataagaaacgtggtcaccttcttagcatccttaaaagatttccagaaaggctagctgaaaatacattccctacctccaacaaatgactgttagaggttacttctcatccacctaagcagatgtaacagaaaatggatagtctgtctacttggggcttctaaacgttgttcggcactgaaggttgactttggagactgggtcatgaagcttgacctcttaattactgaccttttgttatacatgaaattccttccttattttcttgttcctagatcacaccagatgatgccagggataaaagaccgctgactgtgataaaagaccctttgaccattacatccttaatgtgaaatgttaaatatacccttcccccaaaaagaaacactgcctataactaattgaattgctctaactatgcactaacctcgtacgaaaaatgatgtaaccctgttaagcatccccaggccttgcctatgtaaaggaccctcaaacctctccactttggagcatttacctcatccttcaggagtctgtgtcctcctgtgtgaccatcctcaagttttatgctcaaataaactcaatttttaatcatattgcctaaatgtcattattaacattgacatggagctgattatcactcctttgttttacctctatacccagtaaacataactgtaactgcagtaactataccctgtcaccattatttatttatatattttcatcttgaacttgaccatgagatccttgatgaaaaaaacaacagtcttatttatctttgtttctccaccaccaatggaaatattaaacccagtatcatcttaccacagattcctttatcaaggcttcctgagagtccttaaagatcaaggatgtgcaaactatgatgaaagaggtgggggctaaatccaaccctcagtctgtttggcacagcccatgaggaacactgcttctgcatttttaaaaggttgaaaaataataataatatcttgtgacatgcaaaaattatatgaaattcaaatttcagtgtctataaatacagtgttattggaacacagccatgctcattcatttatgtattatctatgactgcttttgtgctacaacagtaaagttattgagacagagaccatactgtctgcaaacctaaaatatttactatctggcactttacaaaaaacgttggtcaactcctgtaaaaaggaagaagaggggaagtgagaaaagtggcatattcacttaacatttactgaaggatttatgcatccaacattatgaggcaaaaaaaataaagttagacactgtcactaactttgcagagagataaaatttaatataatgtgataagagagaaagagcctggaaaggagtggaatggaatttccaggcagaaagaaaagaatggtaaagctagactcccaaacaaaagggcttgacttttgtgaagaacagggatacctgccatatggcagaggcataaggcaaagtgaaccggagcaaggggtgcagatgtatgttctagataacacggtaaaggcaggcattgggaatggattatgaagtttctggtatccaaaattagacaccctaatttgtgcactcatatctttcctctactgtacttttcacaactgtgagtcatgtttaatttcctagcaatcacatattccactagtccatcactttcccaatccccaaatctccaaagcttccatctgtaggatcaccctcagattatgaccttgaatcctactttactgagaaaactgaagcaattaaaagagatttccaaaatccaccacaaagtaatgttatacatttcaacaatgtgccatttcagcctaaactgaagactgatttcattacaactctgaaacacaagaaattaaatgcaatctggtattagctacacttttaaactaagatatttttggaatgagaaattaggaacatatctggcacatgaaacaaactcctgcctagctacatcatttgcttctcaatcaatgaaataaaagcactacaaaatatgccttttagcttaaaaagggataaattataaatgctctcatcttctttattgctttaaaatttactgtaaggtggtgcaataataaaacaaaatgcagtcaggtgcagtggctcacgtggcaatcccagtgggaggaaggcttgagcccaagagttcaagatcaacctgggcaacatagagagacactgtctctaccaaaaaaaaaaaaaaaaaaatagccaggcgtaggggcacacaactgtggtcccagctacttgggaggctgaggtgggaggatcacttgagcctgcgaagtcaaggctgcagtgagccaagatcctgccactgcacttcatcctgggtgacagaatgagaccctgtctcaaaaaaaaaaaaatgctagttgtcaatataatttaacctaaattttatcacagtgtttcttgctgagggagaaaataacaatgcaatggtacacagaggacaagtcatccaataaattttcttatgcataataggtccttaaaagcttgcccttaaaactatttttaatccaactaatttacatactagaaaagttatgacttagtacaatatcataaaattcttttatgcaatcaccctctcaactaaactcaaggacagagattataaattgtattcatatcggtactcttggcacatagtatggtatctggaatgtaaaagacatgcaacaaaccagcctgggcaatatagcaagacttcgtctctgaaaaacaaataaaaaattacctgggcgcagtgacacacgcctgtagccccagctattcagcagggtccctagagtccagacgttcaaggctgcagtgaactttgatcgcaccactgcactctagcccgagacgctgtctctttaaaaataaaagacatgcaatacacatggaatgtactaataaatttgctcttatagtgaatgtaagatttccctacactaaatctgtttgaaaggaaatatactcaaacagcacatatgcaaagattaacgcctctttagtttgattttaacacaaatacccacaaagccctaactgccctaataatgttccctactatggagtcttccctaaaacacatacaatattgctctcccggcaaacacaaaatatactaaataaagcaccagaattagggtctggcagcccgggttggaatctcaactccatccttttactagctgagaccttaataagttacttaacctctttgaggcccattctccacacctgcccaactggaataaccccctccaatcctacagggttgctgtcagaatgaaaagagctaataccgagcctggcttaaagctgtagtccagcaaatactcctcttcccttagattccttcagaacgcccttgtagaaagtaaacgtggttattatcttcattattttcggacttatttatttaaaacgtaaatcgaagcctgaggagcccaggggaaaacctccttcagcttaatagctccagcctgcccagctttccgatccaattaagtatttccatgcctggagctcctattcgtgttttaggatcagggaatttccctcccaaactgtgtcatgagatctgcgcattttcttctcactgaaactccttttaacacgcaaggtaatgatccgcgcgtaacctcgcagggaagagcaagcgctcattacccagctgttcagacggaaatttacatcaatatttgttttccttctttccctgaggttgctgagggtggaacgacagcgtccaggcaaaggcagtgtcccgaagtcccacggccggacccggtcccaggggagcctcgcggagcccccgccgcagggccccgaccccctcacgtccgcatcctgggcgctcccaccgcatccccgaggctggcaacccgcgcttcccgggagctgagggaggtctgtttccctcagctcgccgcctctgcccgcttccgagcccgcttcaccccacacctcagacgccgaactccccttctctccccgccgtccctcgctggccagcccctcctcgtcccctcaactcccccagggacggctgtcccaggctagcctcaagcgccgccgccgcccgcgacgcccgcctcacctcagggcccgagccgcagagctgtcaggcctggacgcgctcagtctgttgactcagtgcgggtgacccagctgggatctgtgcgagggcgcggccgcgcgcacccgcgcgctcctggcgcaggcagagctggcggcgccgaagtcgcgccccgcctcctgcagagcgcacctgagggcggggctcctagaaagcgccgctccgcgtacgggcgcgcttcagacgctcggccccgcgcgtcccggcgcacgcaggcaagcagcgcgcccggaagaggagagcggctgagggtggggcgagcggtggcgcgccgctgcccagggcccctgagccactagagtcgggcctcgtggctcttccccagggcctcccacgcctgggttctgcggggatctcgccacgctctttctggaggcacgggcaaaaaccacggcctcgtgtctcagtggtaaacctgccgcctcttagcgggtgaccttggcccacggccctctcctcatctgcctcgcccagtcacgtctcctcttaagcatccttgccgtctgtctcctggcatttggatgggcctctctgaacgcgttttgagtcctctgcagccccgcttcctcccgccgcggcatctggagtgctgtggccccgtttccgtaactcttgcctcccctccccagcctcctcattggccctcacaccccgacctgggaggtcctcccactgagggtgcttgtagttcgcggagtgtcctcatcaaagactgggaatgcggcagatgctgaattttccaaacggcctgagacacatgacatctgtgagagactggatactgcacttactttgctaaaaatataatctagtgttttgagcttcattactcaaagtgacctaaatggggtcaaaagttattaacactaacattacgtattttcctctccacatttctgtatagtcacattcccttgcacaaagactttttttttattctgtcaatcctgtgtacatcatgttttttttttttacttgtctttgtgttatctgcttctcgaatttaaaccaggtctccccaacatgcactctgctttctaaattcttaggggaaaaacaaacaaacaaggaatcaagttttacttatggaatatgaattaaatagaaaattcaaagaggttcgtcagaatccttgatgattaaaacagcggtccccaaccttttgggcaccagggaccagtttcatggaagacagttttttctgggggagggaggatggtttggggatgattcaagcacattatatttactgtgcactttatttctactgttactacactgtaatatgtaatgaaataattatacaactcaccataatgtagaatcagtgggagccatgagcttgttttcttgcaactagacagtctcatctgggggtgatgggagacagtgacagatcatcaggcattagattctcataaggagcacgcaacctaaatccctcacatgcgcagttcacaatagggttctcgctcctatcacaatctaatgccactgctgatctgacaggaaacggagttcaggccctaatgccagccatggggggcccctgtaaatacagataaagctgcactcacttgccctccgctcacctcctgctgtgctgcttggttcctcgcaggccacagatcccggtagcagtctctggcctggggattggggacccctggattaaaagatctagcaatggggatgggggaaagggagataagtatattcaaaaaactacaccaggaaactaaagaaggcatgtaatgaaaactatccctgatatattctgtctcttttggaaacatctagaacattttagttacaaattctcaatggcctaggatttggggccaagtaaagaaatatacatgaaagataaacttggttaacatgttactgaaccatactttcaccccaacacttctcactagtagccttaacctgccttaacttcagaagtctactcatttctactactattctaggcatttatttcttacatttcttatccttgtaatgttctctgtcattcattctgtctgctcatgcttttactcttgtttctaaatgacatgaccaaaacccaattctccaaaaatctcatcaccctggacaaaatgatctcactctcctcccaattgcctacatactaccatcttgttcacatcattttatttacttaccatctcttcaattaaattgtaaatagtcttaggttaagagctttttcttgacttgtctttttcttttcttttctttctttctttatttttgtgacaaagttttgctctgtcacccaggctggagtgcagtgccatgatcacagctcactgcaacctctacctcccaggtccaagtgatccttccatctcagcctcctaagtagctgggactacaggtgcatgccaccacacaggctagtttttgtattttgttgtagagacagggtttttccatgttgcctaggctggtatcaagctcctgggctcaagtgattctctgtccttggcctccaaaagtactgggattacgggcctgagccatagcacccaggcgaaagcttcttcttataccgatttaaatttccaagtcctatgcatcatagtatacagtaaatattattaatgcttccaatgagaaaacacatataataagcaagaatattcaaatattttcatttcccccacaaaatgtcaccacccactcaacaagggctacctactcataaaagggaagatatcaaattccccttataggatgaatgacaaaattatgatggtgatattgtttggctctgtgtctccaaccaaatctcacctttaattgtaatacttcccacatgtcaaaggtgaccaggaggagacaattgaatcctggggacagttttccccatgctgttctcatgatagagggtgagttcttacaagatctgatggttttataaggggcttcccccttcactcggcactcattctctctcctgctgccctgtgaagaggtgccttctaccatgattgtaagtttcctgaggcttccctcaccatgtgaaactgtgagtcaattaaacctcttttctttataaattccctaatcttgggtatgtacttatagctgcctgagaacagactaatacagatgtaatgcagttgtaagaataatttaacagagggaatactaaataagacctattaataaaaagattgccacaaattgatgtatggaccctgacatattttactgtctgtttgaacaggttatttatcaaactatttgtaccttgtaaacaatgtagccatataatctcaatctaaatttccatagttaccaggtcccagtactaagtaagcagcttcagggaagatgttcctttctgagcttccgtatctaggaaagggaaacaagccatactgatgggttgccatggtggcaattctagtccccacatctcattaatacatttcttagacaaataaatcagatgggaatacataaatcatgggagttgtagattgagatttcacaagttgcctagctgtacaaaattaatggtgaaccggaattttgacagtatttaatgtagagtaagagaataaggcttgctaccctagatacgaacctacaacctaccctcctcctgctggtgaacaatgaattctatttgtgttactttttaatttgctagacatcaaagccttatttaatggagtctctatgccatttttgccaaaattaagagcaaaattgttaaattgttacagcaccttttttactatcaacttagtacattaatttgcatgattaaaatacattgaaaattacatgactattttttaaaatctgtgattattaaatgctattatttgtttttaaacatttaacatttctacaagggtaaaaaaaggtttcaagagaaatgatgtggtttatatattcagagtttagattcagtattcgctatttcaaattggtacgtttgtctagaatgagttaaaacatataaagaaatgcagccttggctgacaaagtaggcagggaatcaagcagctttaccagtaaatagaattccaaactagcatatcaaatgtggctgaaattgttattaaatagctcagtaatatgattaattgataattgttggagggttacaggggagggattggagaagagaatgacttctaaaggtagttttagtttgatttttattattactactaatattattattactattgtttttattacaacaaaaataattttaagtattttaccctttttgtttctccaaacagaaaaattagtcaaagagactgatatttgaagaatgtacagccaaatttgttgtttaaaacttaaccaaccaacaagtatttattaagtgtccagtattcttgtttggtaaaatctcccaactttctaggtgaaccaaacgaaaaaaggtaaagaaatcaacaattgttctgagagttttttaaaaaatactataaaagcatcaaataaggaagataatatttcttccactgttaaattatgtggtgcaaattataaaatgctgtagagaaatctttgagaactagagatacctgttaacttcaagagggaaaaatgggaagattggtttaattagagtgaagaattataatagagggcagagagaaataaaccttcataaatttttataaacacagtttgtaatttacctaagagaataatgtaaacattaaagagaaatttgactcaagttttcttttcttttccttttcagtaaagaaaatggactttacgttggtaaaggtgaaacaacatacaaagaggactgaaacttgagacaggtgaggaggtagtaagaaaacacccatctgtttcaaataagttcatgtttccagggacaaattacgtcccacagctgtttacaagtaacctaagatctattgctggtgagttctgagaaactgtaaaaaaggaaaaagatgatagatcacttgcttaaaacatggtgaaaaggtagacattgaaaactgtagaacagaaaagtaaaactccagagtccatagttaaatgtattagaatttggtggtcactcggaaccagactgactaaaataagacaagtcacaccacacttctttatttgatctttgagagaagatggaatgttatggccatgatataaattaatttcagcaaagcatttaatccagtctttcatatctttgtggatgtgcctaaaataggggcctgatttaattatgattaggtaaattcaaaattagttggataactgtaccctgatttttgttcatatttttcataaattacataggtgaagaaatcattgtggtcaaatcaacaggtgaaacaaaaactacatagcatagcaaatatgactgaagacagaaccagaaaacaaaattattttaacaatttgaactgtgagctaaaacctaaaagataaaatttaacataaatatatgaaaatgtctgcattcaagttgaaaaatacaatagcacaagtacaaagtgggatgggttgtagcttagccatgcgaaaaacattcagaggttttagtgtctgccaagatcaatgtgaggatagcctgaagttatacctctaacacttccatttgaaaatactgccctaccttcctcctccctttcatccccttgccaatattcccctggaataggcagaataatgatccccacccccactcgtcctaatccctggaacctgtgaatatgttcatttatgtggagaaatggatttaagattggagatggaattaaggttgctaattagctgatcttaaaatcaaggagattttccttgattatctcagtggatgcaatataatcacaaaggtttttaaaagtaaaagagagaggcagaagaggagactagaattatgtgatgggagaactcaatccaccactgctggcagtgaagatggaggaagggatgtggatggcctctagaagttggaaaaggccgggaaacggattatcccttagaacctccaggaaggaacagagagccctgggaacaccttgactttatcgcagagagatctgtgtgttgaacttctgtttgtttgtttgtttgtttgtttttgagataggttctcactctgtcgcctaatctggagtgcagtgaggaaatcatagctcactgcagccccaattttctgggctcaagcgattctcctgcctcagcatcctaagtagctgggattgtaggtgcatgccacccatccaactaattttttaattttctgtagtgatgggggtcttactgtgttgcccaggctggtcttgaatgcctgggctcaagccattctcctgcatcagcctcccaaagtgctgggattacaggcgtgagccactgtgccccacctgtattggacttctaacctacagaactgtaataataagtttgtgttgttttaaatcactaaaggctgtggcaatttgtcagggaagcaagagaaaagctagtacactttttatattgtattttccttctctgcattgcaatgctgtgcttatttagcatccacatgtcctttcttctctcttgtctctctaaggaagcaacatgatgccatagaagggacaataactattacttagatgttgtggatttagaaacttagtaactgatgtgactccatgatcatatattactcatggttagtttccataatcactgtttcctaatttgtaaaacagaaatctaaaatagcttccttctttgactctgtgctgcttcaaagaacttatgagatgaggtataggaaataataaaatccaactgttgagcatgtaatatgtgctgcatactcttctatatgctttatgtgtagccttttatttgatctctgcaatgatatgtgagctgtgaactattattttttcttcaccgaggtagagaagtactctgaaaactataaagtaccagaaattataaataaatggatgtcctgtagggaatcaatgtacaatgaagaaaaaaagttttttcaactaataattttctggaaactttttgttttcttaaactttactgatactagctttcgatatttgtaccttgaacatttccatcacagttattctctttcttcattaatctgtccattcattctgtaaatatttgtgaattacctattacatgtcaggtactatcctaagcctttgggatagaacagtggatgaaacagacatggctctagctgtttaggattattgattgcaatgagggctataaaatgggaagtgacaaagaagtgtggtcagtagcatcatgggaatagtggtccatagaaggacattggtgattcatctaatacagacctggggtgtcaaggaacattgtttagaggaagacatatctaaagatttgaaggctaagtaggagttaggcaaagtggaagcagagaaaattccaaaagaatagttaccttcgccgggcacagtggctcatgcctgtaatcccagcactttgggaggccaaggcgggcggatcacctgaggtcgggaggttgagaccagcctgaccaacatggagaaaccccgtctctaccaaaaatacaaaattagctgggtgtggtggcgcatgcctgtaatcccacttactcaagaggctgaggctggagaattgcttgaaactgggaggtggaggttgcggtgagccgagattgagccgttacacaccagcctgggcaacaagagcaaaactccatctcaaaaaaaaaaaaaaagaaatagttaccttcagtatttctgcctcttcgtcatttacattgactttctttttctctctctctctctttaaactcaagtagatccttctttaagttttattcccaaaatataatttgatattaacttcttgtaaaattttcaaacatttcatatttaataagctctttataacccatgtttgtctgatctcacattcttttaatccaataatcaagcaatgtttgattaaagggtactttatttccctattcaagtagaacatggccttctgttattagctaattataatataaataaaattcaaaataaacaagcaaatgtttcctgtataatttcattcttgtggttgctttcctttgccactagatggtacttgtatgcctgagagaccaaaatgctgattccgtttaccttcctggaaactgtaaaactaaccaatcagaggatcaggtcattgagaagaagaaacttgcccaacctaagatgtaagtgatcccggtttttaaatttatccttaaaaattaacccaacattatcttttctctttagataaatatgacagtaaaacattttaaattaaattagctttaatttttgcccattttttaccaacccccataccccttttttttttttacatttctttacttttactttctaatgatactgcttttctaacatcctaacctggaaaattggattacttgttccttattggaggccctccaccctccaagctccttgtctaagctaatgcttttctttctactttgaaaagccactacctcccttctgacccctccctcatagtttttattttcagaaatcctagtcattcttcaaggcacatttcaactagtaccactatcatgaagtttttcctgttactattacttgaaaatgccttcttctgattccttttccattcttctaacaattttagtaatttgtttgataatacgtgtaatgtattattctaaagagctatatgcatctccatagcaattaggcttcctgcattgtgattatttatgaaatttacttaatctctgtactatacaatgtttgcctcttgagtgcagagactgtcttagtagtctatatatcctgaaatattttacatattattatttattgaattgggtttaatgttaatatccataagactattgcaaaaaactctaagaataacaaaataatacggtgattcttaatggtagtctcatgtgtgagttggatgaaattcattagcaaaacctgtggaatcaaatcatcttttccccattttcccttttttcccatggcatgagactcctgccttctccaaatatatagaaataatgaatagagtatgagtattttaaaatataaagctgagtttaaaacagagacagcaaaggcttcagataccagaattgaagaagaaattcaaagtcacaataataaggtccaggagctgaggtttaaccccatttgggactaaaagatgtggtcctaaagccacttatgaggatctggaactaacattcctacataaactagaaccctaaagaggttttcactttttgaagccttagaagtctaggatgagtaggggtgagagtaatggttcctgtgaatattgaaagcctctgccaatggaaatctaattttaccttatcatttgaaaagagaatcctaagaaagagccaggccctatagaagcaaatataaaatccttgatgaggacatatacacaactcaggaaacaaaagaatcccacagaataaatggctttcagtaaaggtgagctctcaataaaatttgcacactacacaaagaaacaatctaccaaaaggcatatgagaagacacaacaaatagaaaaatctgtgccccaaccacttgagttaataaagcaatctgaccactaggtgcagtgacacacacctgtaatcccaacactttggaggtccaaggcaggaggattgcttgaggcctagatttgagaccagcctgggcaacatagtgagaccctgtctctatcaaaaacaaaacaaaacaaaacaaaaaaaaacctggaagtgactatcaaagaaaaatccataaaatgattaaaaacataaaggaaaataaaaatcaaatgaaggaaaagtataagaaaaaataaaaatatttgaaaaaaggaatttattgatctattaataattttgatacttattgaacatctgcagagttctagcactgttctgggttccaaagataaaatagtgaataagatacgtgaatttcctactgtcatagagcttatttctattaaaaataaaaagctctacatatgggttaaatagatggactagatacagtgaaagagataattattaaattggaaaataaatctgaagaaattatacagaggattaaaaaatggagagtataaaagtgaagttatatccttaagagtataataacaagatctaacacatatttaatagaagatctaaaaagaaagaaaagaaataaaatggaggggaggcctgattcaaagagaagatagcagagaatgtgtgagatacaaagatagatatgaaccagaatgcagtaagtccttaacaggatacatgttttaaaagaaatcaatatcagaacacttctagttaaaattaaagagcaccaaaacaagaaaaacaattcctaagaacaaagcaagaaagaaaacatacctataggctgggcatagtacctcacgcctataatccaacaatttggaaggccgaggcaggagtattacttgagcccaagtgttcaagaccagcctgggcaacatggagtctccaaaattaataatttaaaaaattagctgggcttggtggcccatgtctgtcatcccagttacttgggaggctgaacaggaggatcacttgagtcggggaagtcaaggctacagtgagccatgatcttgccaccacactccagcctgagtgacagagtaagaccctgtctcaaacaacaacaacaataacctacctatgaggaaacaaaaataaaattgacaataaaagtgccactagtaaaaagaaagattaaaataaaatttttaaagggctatgggaaattctattctcaactaagctgtcaaaatgaaaatgagaaaagttgtcggataaagaccactagagtttaccattcacagacgtaggctgaaacgactactgacagatgtacttcaaaaagaaggaaattgaatccaaaaggaagaagcaagatgtaagaagaaatattgaacaaggaaactgaataaaatttggagaaactaagtattgacatataaataatgtattataaccaagaaaattaagatgctataacatgaaagaagaggaagtcaggttgaaaatactctgtttctaaattccattttttgagaggaggctacagttattattaattttggaaattgtaaattggagtatgcatgttaaaaatttcaagacatctgtcatgtgtatttgctacattatttaagaatattcaattcagggactagaaaatgaaagaaaggaagaattaattaagagatacatatatatgttagatatataaggtaagtagagtatgtgtgtactgagtgcataaataagaagatatggaaggactgggtaagcaccaaatattcatgaaacacccaaggcaccaaatattaatgaggactcattttggctccatgtatcctctgctcaagacagataaaatccatgggtgctcaacaggtaacagtggtgagttacaactatagccaggcggaccagtccctgagtctttcttgcagagaaaatataaattggctctaggcaccctccatctgccaagtcttctttgtttatctgcaattctggtccttataaccacaatgttagcaggaagaattaatatagaaaaatagaagagaggacatataaacattttatagaataggcttcagttaactcaatcgtatactaattgcaccctttcctaagtacattattaacctactctgcccctttccccttgcttcttgctgtatcctttaaattgattcaataaactgtgatctcagcatcttacttgggtccatgagcctgtctgggccagccctttggtaaaggacttggagacaccattgcatcaaggtaatctcccactaacataccactaaaaggtagagatatgtaacttgtaaattagtaaaagataaaaggagaagaaaaaaatcactcaagtggaaggcaagaaaggcctaaaaaattaagaaatggcatcttaaaatcaaacttgattaccttttgttttatttcaaagatagacaactcatttttaattcacctacctcatcacataatttcttattggttgtaaaatacgtggttaagaaggattctaaagcgaagtcccattttaataaaaaagagtgccttcatctgttggcaatatctacccaaaggcactggaaatgagctgaaatcatatgaggagtacatacgtgtctttattaatccaggttttctaagcttaaaaaatcaccaccaattcccaaagctctcaaaaagtcaattatattttattttagtttttgtaaatttgatgcttttatgcctaatcttttcatatgtttgagagaagttacttcatatactactaattcaaatacgaatatttatagtatctgtaacagtgtgaaaatcataagatagtatttttagttactacataggaaagaaagtccatcaatatgcctataactggcaagaaatttcagccattattcaactgaattccacacatggtcattgagctcttactgtgacatgcacaaggaactctactaaaggatgcaaaatttaaaaacatagtccctgccatcaagaaatttaatagtgaaggagatatccattacatagtcaactgtaaaacagtataatgtcagtagattctacatctagctgggtattaggatcatccaagaagcttttgtttgtgtatttattatttttgactgtcagaacctgtccaagatctgaaaaaagaatctctaagatatgaaatctggaaatgtatagatttaaaagggcttccatatgattctgatacttagccagatttgtgaacaaccatgataaatgttatgctattaatacttagaagaatgtggcttatgttactttattgcagttgttttatgaccctagttctcaaggaaagggaacgtaatatgagtacatttccttaggaggataaacttacaaggataaacttgcaagatagaatattaacatgggttcagccctggagtgccagagaacactatgaaatcatttgatgacaagagggaatagaggtacaaactcacccagcatgttgggggaagggacaggatacgaaatataaacatgacccatgtccaaattgtgccatgaggccggtcctgttttttaactttctctatgtctgcacttaagcctgaggactgacttggaagagcgcttgttaaattggaaactttaattaaaaaaaaatcatatttgtacacttctggttcctagattgtcaattattttcaagtaactcaactattatttttggcatattttttgtgtcattttctaaaaagacagtctatctagtcagataagttttctaagtaggattccttgagtttacctatttttgtgtagaccttttattttcttgtgaagatttttatttttcaaataattttttatttttatttttactgttgtttcatgatgttaaaatggcttgtattcattcttttacaaactaaggaaaagaagaaaagtgtgaattaaagtaaaggaaacattttaactctagctgttctgatacacattatgtaacatatggcttaggatagactgatagaccaaatagaccaattgacccaaaaatgtgcaacaggccaaataccactgatatttaattcttacatagtaattcaaaaggatgccctaggcattgtcatccagtcgggggcagtgggttgaaaaggcacaaagggagaaaagacccccttcttaacagtccagaccctgaagtgacagttatcactcaagcctgcgtttgttttatgagaaacagctatgtggctctacctagatgcgagacaagtgccagtcttggctgtgtggccacttcccagctatagttccatattatgggaggaggattacaaatctccagtgacagctagccatatgtattctctttcttgaaaatgtaagagaatctacttttgaaagtgtctaagcctggcacctcataggggttatttattgacaacactatttttactccattgttattggtcttcttaaaaatttgtggaaattcagccgggcacggcggcccatgcctgtaattccggcactttgggaggccaaggtgggaggatcataaggtcaggagatggagaccatcctggccaacacggtgaaaacccgtctctactaaaaatacaaaaattagtcaggcgtggtggtgggcgcctgtagtcccagctgctcgggaggctgagacaggagaatcgcttgacccggagcgcagaggttgcagtgagctgagatatttatttatttgtttatttttgagacagagtcttgctttgttgctcaggctggagtgcagtggcatgatctctgctcactgcaacctctgcctcctgggttgaagcaattattgggcctcagcctcccaagtagctgggattacaggcacctgccaccatgctgggctaatttctatatttgtagtagagacaagtttttactatattggccaggctggtctcaaacaaccgacctcaagtgatccacctgcctcggcctcccaaagtgttggaattacaggcgtgagccactacccccaggtctgttatttttcttttagatcagggacttgataacatctaatttgtctaaaatttgccaagatatgattctggacactcttgataaagctgtgagttactatatttatgtcacatttgtgttttattagagaaagttatatcttggtgggaaataccaatacattcaattttctagaaccttgctgaagtgtagggacatggaattgccacacctctcctaaggtatcctttggtaccatttatcctggggtgaacatttaggttagtggaaagaagaggaacaccatctaattttctataggaatcaaaatgttctttgaatgacactcaagtcttttctaaaagtctcaactgacactatgcaaatattactttccagtatagattcaattttattagaacctaatataaggaaacatgtttgttctatacaattaaaaaaaaaacaaatgaacacagaagaataattaaatttgaacctaattttatttcaagtaaattacagacacttagttgcatcttttctgttcaatttagagcacacattagacatttaagaaattagaattgttataccctgttactggaaaggagtcctgatccagaccccaagagagggttcttggatctcgtgcaaaaaagaattcaaggtgagtccatagagcaaagtgaaagcaagtttattaagaaggtaaaggaataaagcagccctgagggcgtcaggttgcccattttcatggttatttcttgattatatgctaaacaaggagtggactatttatacctcccctttttagaccatgtagggtaacttcctgatgttgccatggcatttataaactgtcatggtactgttgggagtgtagcagtgaggacccccagaggtcactctcatcaccatcttggttttagtgggttttagcttgcttctttatgcaacctgttttatcagcaaggtctttatgacctgtatcatatactgacctcctgtttcattctatgactgagaatgctttaatgaatgcaacctagtgggtctcagccttattttaccgagctcctattcgagatggagtttgctctggttcaaacacctctgacccctgcacttctaaattgaaaaaaaaaaaaaaaaaaaagtatcactgaattgagtttttttagaaccatgaagattttttttttctgaaatgtaacatttttctatatgaagaactgacattttaattccataccctactcactcatcactctgctcaaattatcattccaattcctcaactcagtggtttgttgttgttgtgggttttttttctatttatagtagatgaaaactaacattgatgttataaaaataacattaagatgcacactcaaagcccataagaaaatctttctgggttgaggacatttctggctgggttttcagacaacaaaagtctgttgacttttgaaatatcctttgtttgacattggattgttctcttttgcctgcttgatcagaacaggtgaatttaattttctcttttctttgttctattatgaactgcaggcacctctttaagaggacccagtaggagagaattgcccttgaaatgctaaaatggggaaaacagcttgagaatgttatgaggcaagacagactgacgtgaaagatattttcatctccgtgcacttggtgccaactcaaggccaagttaggaaaacagtccacgatgtactgtaaagtaatactgaatggaacaggtgagttaagaatggagtaagaatggaaaagtgagtcagacataaagtcacaacaccctgaatttgtcctcaagataattatcagtggcattaattggcaaatttctgttactatttaacagtaaactaattaatgctacaaatatttgcatattgtggagagaacattacaatgttcttggtgtaaaacctagatggggaagtggaatttagtttcaaactccaacctatctcttaaatcacttatttctatttcaagctgaaggagagaaaaattattttgcatgaaacctatgagaatttagggtgcttatcaggaaaaggggagtgttctgctagtaaaggctttatttaaatttactaagagagagtgtatttgctgcttctatggcaatttttctgtatgactactttctaacaaaaatgaaatctttctgtccaaaataggtgagtgctttaaatgagagagcctatatcatagtctttgattgttgatcctgtttttacatggctttggaacaatctcaggttcttaattcttagcttttcctttacataactataaaaatggagatgataaaatgctgaaaagttttaaatgtttgtatgtgtttgtttgctttgttttgggattcccgagtggacatttttatcgctatgaaatattactacactgggaacttgaaaatacaggggcagattcagggggcaatgccataaaaatgaagacaattctgatgaaacaaaactttaaaagtatgaacttttaaacactttaaagatatatatcttagaattaagtttaaaaaaaattttttgaatgttgatgagggtacagggcaatagaggttcttatatactgccagagtggtgcatactggtaacatctttctcgaaagtaatttatcaacatgtgtcaagaactttaaaaatgtttttaagccaggtgtggtggcttatgcctgaattctagcacttcaggaggctaaggcaggtggatcacttcagaccaggattcaagaccagcctggccaacatggtgaaaccccgtctctactaaaaatacaaaaattggcagggggcagtggctcatgcctgtaatcccagcactttgggaggccaaggcgggcggatcacctgaggtcgggagttcgagaccagcctgaccaacgtggagaaactccgtctctactaaaaatacaaaattaggcgggaatagtggcgcatgcctgtaatcccagctactcgggaggctgaggcaccagaattgcttgaacccaggaggcggaggttgcagtgagccgagatcatgcgcctgcactccagcctgggtgacagaaggagactgtcttaaaaaaaaaaagtgtttttatttatttgcttaggctgccataacaaaataccgtagactcagtggcttaaacagcagaaatttatttctcacagttctggaggctggtgtccaagataaggtgccagctgatttgatttctggtgagggctctctctctggcttatagaaggctgccttcttgctgtgttctcacagagcagggctgcagggagagagagaaatatctttctttccttctaagactttagtccttcctattggttagggtcctatccttgtgaccttatttcctaatgacctctctctagatatagccacattggagattagtcacccacataggaatttgggtggggaacataattcagtaatgttcttacccttagatcaagtaattcaacttctagcaatctatcctgtgtgcatagtgtaaggtatgggtggggaggaaggggagagaactgaaatgtagccctagatgtgagcttatttatattcatcatattctttatttacaatttaaaatagaaaaacaacacaatgttcaaaagatattttgaacacaatacacaatacacaatacacaagtctgtgtttgtaccctaacacgctcaaaaaatagttgagtgtgttgtggcacaacatagaaaattagacagccaaaacttttaatttttttaatcatgggaaaatgattacattctattttaaaatgtaggataatggctgggtgtggtagcttacgcctgtaatcccagcactttgggaggctgaggcgggcagatcacctgaggtcaggagtttgagaccatcctgaccaacatgatgaaaccccgtctctactaaaaatacaaaaattagctgggtgtggcggtgcacatctgtaatcccagctactcaggaggctgaggcacaagaatggcttgaacccaggaggtggaggttgcagtgagctgagatcgagtcactgcactccagcctgggcaacagagtgagactctgtctcaaaaaaaaaaaaaaagaaaagaaaagaaaagaaaaaagaaaaaaatgtagaataaaaagttatttatgtactgtgacagccacaatgtaaaatatatgtatagatgcatagagaaaagccttaggaaatatattacaaaagattaacagtgattatgtctgggtagcaggattatatgaatttttatcacattttttgcaataagcatacagtgtattgataacattaaaaaattttttcaaagtgaacaaatatgtaaatgtggggtaaagtcaaaataggaaagctaaatgtgtatgattatctaggaaacccaccaagtatcttaatgatgagatgaaatgaattttctaataaaatctcaggtaaataaatttaggctgtatttatttgtttgtttatttatttattttagctctattgttctttgtaatccccaaagggtttccttccttattctgcccatgtttacaggttggagatagaaaaataaggagaatgcttctgtttacagtgtgtaaattgaatttattgttcttttagatagggctgctgaatggaacacacgaaaagccatttttttttgtatgtaacttttttttatgccttgccttatttccaacataggggtcctcaaattttctttacaacagagttgaatttcaggcttcagtggaagtaacgatgaaacctgatcttctgctattaaagaatctcctcctgctgctctctatccttaagcttgatgagatcccttttgaaaataaatgttcgggctgggtgcagtggttcatgcctgcaatcccagcactttgggaggccgaggcgggcggatcacctgaggtcaggagtttgagaccagcctggccaacatggtgaaaccccatctctactaaaaatacaaaaattagcccggcgtattggcacatgcctgtagtcccagttactcaggaggctgaggttgggaggattgcttcaacccaggaggtaaaggttgcagtgagctgagatagcgccactacactgcagtcgggttgacagagcgagactctgtctcaaagaaaaaagaaaagaaaggaggggaggggaggggaggggaaaggagaggagaggagaggagaggagttgaggtcattattacaaacaattctgcctgaggggaggggagggaagaggagagcagaggagaggagaggaggggagaggagttcattattacaaacaattctgcctgacactgaaacatgacttttgttattgtggattggtttgtctttcttttcttttttcagacagtctcgctctgtcgcccaggtgcaatggtgtgatctcggctcactgcaacctccgtctcccgggttcaagtgattctcctgccttagctacctgagtagctgggattacagggatgcaccaccacactcggctaattttttttctatttttagtagagatggggtttcaccatgttgaccaggctagtctcgaactcctgaccccatgatccacctcccaaagtgctgggattacaggcgtgagctaccgcaactggcctcaggtttactttattttttttttatttttatttgaaataaagtctcactctgtcacccaggctggaatgcagtggcatgatctcggcttactgcaacctctgcctcacgaggtcaagtgattctcctgcctcagcctcccaagtagctgggattacagtcatgtgccatcaagcccggctaatttttgtatttttagtagagatggggtttcaccatgttggccaggctggtctcaaacgcctcacctcaggtgatccgcccgcctcggcctcccaaagtgctggaattacaggtgtgagccaccatgcccggcccggttttactttagaatgtccttggacaacagcgtaactgcctaatgaattcttcctacccattgcactgacaaaaccaattcactgagaccatggcattgcaataaaaaagaatttaattgacatgaggctggtcacaccccatgggagactaatttattactccaatcaatttccctgaaaatgtgagcctgggcaacatggcaaaacctgtctctacaaaaaaatacaaaaattagccaggtgtggcgtgcacctggagtcccaactacttgggaggctaagcctgggaggtaaggctgcggtgagcccggatcacaccactgcactccagcctgggcaacagagtgagactctgtctctaaataaataaacaaactataagctaaatgtctctcaaagttagcttggcctaagcccaggaataattaagggcagtttggggattaaaggcaagatgcgggttggttagtcctctcactgtcataattttctcacttttataatttttgtgaaggcgatttcaagaagtggagtctattcagttagttgggggatttagaattttatttttggtttacactttccaaaaagcccagctctgagaagtaaaagtctaggctttcaaatatgtgtgtgtgtgtgtgtgtgtgtgtgtgtgtgtgtgtgtgtgtgtgtattcagacagggtcttggtctgtcacccaggctagagtgcagtggcatgatcccagctcactgcagcctcaaactcctaggctccagagatcctactgttacagtaggtaattagtctgatatgagcagaggaggagaggctcctctccacatcaggaatgtcaggtgaccatcaggtgatggtcagtcagtggttacactgtctctttaaaagaataattagtcgcagctggtggcagggaaaggcagtcgcccaacagatagaaacacctgaaactggtgatcagcatcttcctgataagatctcaggagttgagcaactgggctcaagcatgtgcactaagaggcaaaatagcagagtttaactggtatatgacctttctctggaaatgcttgactggtaagggaagaacaccttaagtgagcatgtgtacaacttcagtaaacacacttcaagtgcagcccctccaagtgctagcaggccactgtgcatgcagatcgcccaccccaaaggaagaatcaggggagaagtaatgcaaccctggaagtatgccagtgtgtaagatcccaagtcaaaggccaaactgcacacttgaatctctcaggttgcctgcttggccttcttccagtgtattttacttcctttcattcctgctctaaaactttttaataaactttcattcctgctctaaaacttgcctcagtctctcactctgccttatgcccctccatcagattctttcttctgaggaacaagaattgacgttgctgcagacctgtatggattcgccactgccaacactcccacctcagccctctgaataagcaggacaacaggtgtgcatcatcatgctcagctaattgtgtgtgtgtgtgtgtgtgtgtgtgtgtgaagacgacttttcactatgttgcccagacttgtctcaaactcccggactcaagtgatcctccttcactggcctccgaaagtgctgggattacaggcataagccaccatacccagcccctcagaaatatttttttatttgtgtttttcaaaagcttattttggagtacaaatgccaccaatttgactattccatctctatgttaagtatactgggtagttcgaatttcataatataatttacagaagatgggaacaacctcagtaaataactcaaaatttatctgtgtgttcaagaccacactcatttattcaacctatatttgttgagcactaactatgtgctagacattgtcctaaacactgatgggtatacttcaaaagataaaaatacagttggttttcacagcatgtaataagttccctgaaacattttgaaagaaaagtggtgacccaaatatatgttgtactacaataattcattggtggttgaacaccagataatgtactctggggacctaggcaaagaatatgagcatatcaccacctgaataaaaccatgaattagttacaaaagcagaatcccaatcgatttccagattggcatcaaggtaaaccaaacagtgttacaaatccaactcaggcaaacaagagattaatgagctaataaaaaaaaaaaaagcaagcaagtcacagactaagaggaaaccaatgcataaaaaagttcaaaatagggctggacgcagtggctcacacctgtaatcccagcactttgggaggccaaggtgggcagatcacgaggtcaggagtttgagaccagcctggccaacatggtgaaaccccgtctctactaaaaatactaaaattagccaggcgtggtggctaattttagctagctgtaatcctagctactcgggaggctaggagaatcacttgaacccggcaggagaatcacttgaaccctggaggtggaggttgcagtgagctgagatcacgccactgcactccagcctgggcgacaaaatgagactccgtctgaaaaaaaaaaattcaaaatagaagggaggtgaaactggcataattctctgagtgtggatttaagtattcaccaatcttgatgaatacttaaatataatgtttgacattgtgtcagtggcctcaagcctaatcatgctagtgtaataatcttttttggcttttgcattttctttctttcttttttcttcttcttattttttgagatagagtctccctctgttgcccaggctggagtgccgtggcacaatctcggctcattgcaacctccgcctttcggcttcaagtgattctcctgcctcaacctcccgagtagctggaactacaggtgtgctccaccatgcctggctaatttttgtatttttggtagagatggggtttcgctatgttggccaggctggtctcaaactcctgggctcaagtgatctgtcaccctcagcctcccagtgtgttgggatcacagatgtgagccactgcgcctggctccttttgcactttcaagacagttataagcaacttatataagttataagttattttagaacaaattaagtaatacttatgcacagtctgaataacaacgaagttctaagtcacattcgtttctctttattttctcttggctttcttctatttgcatggcctcaagtatcacctcaatactcaatctgtaacccgtaagagcagcccaagcaaatgacttggcacatcttccaaattctagtgatgcatcaccaaatgcttgctggccattttccccgactgttttgacatctcaaactcacgatgtcccagacatcaccttcctggaaatgtatctatcctgctgtaatcatatgcacccccttcatggtgcatgtgatcaccatggcaccacccccatcccttttcttctaaactccttcctcttccaagtctcccagattcagaacctcaaagctgtctttgatttttgtgtctgaatcactatccttctagcttacaattcccatccaggctcagattcatactaaatcgaggtaatcagtgaggtagtctttacatatgtttgatttttatttgtatatgctatagagaggcatatctctgggtcatattcatgacctctttttaatgcctctttttattttttttggccactttaagaagatgtagaagagatgtatgtggttgcagcaagttgttttatttgtattcatgagtgctgccagtctgctgaaaaatgcttgtcgatgatggactgttctcagttatccattccctagttttctctgtgaaagagaaattggtcacctttcactccagcctgggcaacagagcaggaccctgtcttaaaaataaaatcgattacttttattgaacagtataaaaaagaggataacattccatcaagtgtaatagtgacagaaaaataaaactgtgctttccttttccaaaaaaaaaccaaaaaaaaaaaaaccaggtattgtcctaaagcagcaatcctcagtgatgtagactgaatatttgtgttctgccaaaattcatatgttaaaatctgttgccaaaatgtgatgtgattacgaggtggggtcgttggaaggtgaccaatgaccgaggctggagcccttataaaagaaactccaggctgggggcagtagctcacacctatttgggaggccaaggtgggtggatcgcttgagcccaggagctcagataccagcctggccaacacggcaaaaccccatccctactaaaatgacaaaaattaggcaggtgtgatggcatgcttgtagtcccagcagcttgggaggctgaggcaggagaatcacttaaacccaggaggcagaagttgcagtgagctgagatcatgcaagcacactccagcctgggcgacagagtgagactgtctcaaaaaaaaaaaaagaaactccagagagatcccttccttttctgctcttccaccatatgaggacacagtgaaaagacagctgcctgtgaaacagcaagctggccctgatcagacactgaaatctgccagtatcttgatggtggacccccccagcctccagaactgtaaaaaatacatgctaattgtttataagccactcagtttatgatattgtgttgtagcaacatgaactaagacagtacttaattatgctttttcatattctggaaacaacattttaagacagtgattctctttcagggtatctgtaacatccaaataatacaaacataataatactgaaggaaaccagaatatgccaccccaaaatatgctgctttgacataaaaattattttcaggctgacggcattacaaagcagcaaacagaagaaaagctatctctatccaaccccttttctcccttaatttttctttactggagacaaccctagactcttaccagcccagacatggcaccagaggaatctgcaaacaaactttactgcactagtttcctcccatatattttaccttcccacagtttctaagccactgctttgaattacttttcattgagatttctctgcatgatgtgtgttatattcatcaataacttaacttttctcttgttaatctatctttcattatagaaatcccagctaagaactaggaggagtttaggaaaaaattaattagttttcctcctgacaatgccaagatagaatgttaatatgcaacatgttcatcattgctattttaaaatcaatcaatatttaaaattttctttgtttcaattaccaaaacattaagtgttgatagttataatccacatagacaaaagttctttgagatactcagtaagtcctacaagtacaaagtggtacagaaaccaacaagcccaagtgtattaatatgattttattacattagtattatactatagtattatattactagactttgaaatgggcataaaagggtaccaggtgtcatattatgcacacctttctgggttatctcttgtcattatctatgaggtattttataactctgtaaattgtagagagctaagaataatacacatgatttctgaccatagaaatgcagatgaattgtgtgctggcagaaagcaactgattattgccctatggatattgacaactttcaccagttttgcagctattttaaaatgtatttcagcattcctgattgcctacgtatcgttagcattttagattttcctttgaaccacatgtctcttgataaactaggagttcttcattgataagagttatgtattctttattcccttatcatctaattggtgctataatcattggggggagttaaataaggtcagtctaactggtaagtatttgagtatgagaatgttaatacttgccttatttttttatagggtttcctttattttagtaatttactttcctgcagtatttgtccttaattctatataaattttttacagattatacaattaattagctgaagtgaaacaacaaaagttagaaaaagcaaagcaagaagattgtacccaaaatagagcaagggaaaaaatttataaggggagcaggcagatggggagagggacttcagtgtttcaagcctaaagcataccacaactgaaactgttaaatttaatttttattcgctctacagaaaacactagagaaactttgagccaaaaatacatgctgactttatacagtgtaaagagttttaaaaattatgtgtactactagacaaaattatttaaagtcaatacctttttcttcaaggaatttcacatcttgtgattccttccctgctcatcaaggttaccttagtttctctaaagattgagtcaagatttatcttcaagatagtgcttttcaaaagaattgatgcataatccacagttgtcctgtctgcccacagttcttttattttggttcattttatctccacttgaatatggacatactgatgccactttcaaaaattctctacattttaaaaaataaatggctctcaatttctgacatcctctctaaacccaaatgagttcaaatcatatttgttcataagttgtcacactgaagaatagcatgggatataccactaccttcaaatccagacattatgtcctcaagataaaaggcttaaccaaaaaaaaaaaaagtccatctcgatgtattatgccaacatgaaactggaatagtaaatcaacatagctgaaaatttccccatgtcgtatgctttttattttttatttttgttatttatttgttttttgagacagattctcactgtgtcacccaggctggagtgcagtggcatgatcatggcttactgcagcctcaacctcctgggctcaggcgatccttccacctcagcctactgagtagctgggactacaggcacatgccaccatgcctgactaatttttgtattttttatagaggaggtttcatcttgttgcccaggctggttttatgcttttaaatgatcagctctacaggcttggagccaacctttatggttatcaatacccccataactttaacctgtcttaggtatcagactattccttttttattttttccttgctctgtcgcccaggctggagagcagtggtgtgatcacagctcactgcagccttgacctcctaagctcagttgatcctcccacctcagccttctgagtagctgggatcacaggtgtgtgccaccatggctggctaatttttgctttttttgtagagacgagggtctcactatgttactcaggctggtcttgaactcttggtctcaagcaatcctcccacttggcctcccgaagtgctgggattacaggcaccagccagcacacctggcctaatactccttcttatatgtgtcaaaaatcatactaaacaattagttctgggttgcaaatgaggatttgtttttttgcgtctgtccatacatttttgttaatatttgtcctcttttgggagttttaattcctttattcctcaaacaggtgcaacccataacagacctcctgtattagttatttccttctccaacatttctctttcttttttccttttcttgtgttattcatcaattccacccccaaaatccaatgaattgagttaggcagggcacgtatttgtgtgtgcatataaggagattgtggcaaaggtcatatatgatactccttttttttttttttttttttttgagacagaatctcgctttgttgcccaggctggagtgcagtggtgtgatctcggctcactggaacctcagcctcccaggttcaagtgattctcctgcctcagcctccagagtagctgggattacaggcatgcaccaccacgcctggctaatttttgtatttttagtagagatggggttttgccatgttggccaggctggtctcaaactcctgacctcaggtgatccacccttctcggcctcccaaagtgctgggattacaggtgtgagccaccacacccggccatgatattactattaagcatacaaaacaagtatggagtatactcttgtagtggataaaaggtatacagacatagaatacagatctcctgcccccagagtttattattacctggaagaggagaaaatacatttatagaaataatgtgttgcaaggaggaaattctataaaagtgatactgatagaatgacataggccttctgaagaagaagagaatccttcctgcttgggaggtaagaataaattcagggtgaactattgcattacgaatttctcatcttgagattctaattaagtttaaaaaaaaaaaaacacacaactagctcaggcatggtggctcacacctgtaatctcagcattttgggaagctgaggcaggaggatcccttgagcccaggagttctggctgcagtgagctatgattgtgccactgcactccagcctgggcaacagagcaacaggctgttaaaacatcctctctgtcacacacacacacacacacacacacacacactacatagaatggaagttttcttcactggggagatcttataccttaccaaaggttttcagttgggagaatattttttcaataaacataataaagtggtattaataagaaatgcacagtatatggactatatatatatatatatttaagttttgtcaagttttaataaaatggttaagagtatctggtgtggaaacaaactcctgagttttaattctaattctaccaccttctggcaatgtgaccgagggtagataactgttcaatatctgcaaaatgcagattattatagatgttgttcttcagttgtgagcactagatgtgataacagtgcattcaaagcagactcgaaggccggactcgaaggtggtggctcactcctgtaatcctagcattttgggaggctgaggcgggctgatcgcttgaacttgggagttggagaccagcctggctaacatggcgaaaccacatctctacaaaaatacaaagattagctgagtgcagtggcacgcacctgtggttccagctattcaggaggctgaggttgggggattgcttgagtctggcagacagaggttgcagtgagccaagatcacaccactgcagtccagcctgagcaacagagcgagtctaaaaataacaataatacagttaaattaaaaaataaagaaaaacccaaaacagactcaaagagaaatgttattttagagtcaataagagtagtagcagcaggaatacaaagacttgaataaaaagctagaagttgccagattttttggtcttctaacttattagaaaatacatttgtttggataaacattggaataaataaatacattttttactaagtagatacctgttaactttctgctgaaaattcatgacaagccaataaaattctgcactggaaaacaaacaaaaagcaaacataaaagggctaaccaaactcattttaaaaacatacattcatatttgcatgataatgcataagagccaaaccagtttaattcaaattgcataacaatttcaataaacatgatgtttcatgtatataaaataaaatacatattaattgccattagatgccattactagcttaccccattatgtattaagttcatataacaagtgtaaaacttttagagaaatccacactttgactttcatcttggttctgtaaataacaagactgctatataaacagttgttttgaataaacattagaaatacacaactttccgtactgacattttttctagaatttttggcatagtaagtcattattttatatcatagcacaataaaatagtttctaaataaggcctgaggttaattttcccacctttgcatagaaattacattctatacttggtcatgccgttctctgttgtggaaggtgaactatgctgtaaaactaacagggtctagtttagtgaaaaccagacaggcttcctggcccacctgtgctgactgtataaaagcatgtcctaagctgagagcacagattactcaatggttcattcaggcataagaactcagcagccacactagagcaatattttgacatagcctagaaaagcactgccctctgtgggtagttatagaagggtttgttaggacgtgttggagccagatactatgaactcccaaagctgatagccagctgaactgattgcctcgtgtgtttgcttggaagagaccagccacctggccacatttgctcattagcatctacagtgaaatgagtgccactaaggcccacattcaacccatggttgcaagtgaaaagaaccaatgctcttgggtgaaacatcttttgtgttctccaggatgctggtgatggcccctggcttgactggaaattcatgatccccagataattcagaacatctaagccacataaaactaccaactatgttgcttgcaggtatcatagatgaccaggcagactatcctacctgtgcctaggtggtctgcaaaaaatgttgccttcacagcagtgatcgtgagccagcccacattcatagattcatagaagtctaagtcctggcaaacgtagctgctctgtttctgagtcaagtacctctgtttagaatatcatagcttcaaactagggtacaccattccctctgtactgtccacactgttcgtaaataagggaatttaaggtttgccagcattatcttgattcatttcaattcattttattcatttatttaacaaatgtttattaagtgcctactatgtgcaaagcactgtactaggtgctaaaggtagagcaatgaacaaaacacacatcacacacacacacacacacacacacacacacacacagagtttcagtggaggagggaaaaaaataaacaagataaaaagtaaagcatatgaaatgttaccccatgtgaaggagaaaaataattaagttggcaagagagatgctgtggtttcaatgtccccccaaattcatgtgttgaaacttaatctccattgtggtagtagtgagaagtagggccttttgggaagtggttaactcatgaatgaattagcaccttagaaaagggctggagggagctagctgagacccttttgctcttcctctcttcaccaggtgagggcacagcattcatgtcctgttgcccttcccccctctgtcatgtgaggatgttgttgcaagaagatgcttttactggaacagaccctcaaagaagctgccagtgctttgatcttggacttgctcgcctccagaactgtgagaaaaaaaaaattctattatttataaattacccagtctgtgttattttgctcttgcagtacaaaccaggcagaccaacctacctgtgcctaggtggtccgcaaaaaaatgtagccttcacagcagtgttcgcagagccagcccacattcatggattcatagaagtctaagtcctggcaaactgacagaagagctatggcattgggagagtgggaatctaaattttagatgagatagctaaggatacctcaattaaaatgtgacattgtaggcaaagatttcatggctaagacttcagaagcatagacaacaaaaacaaaaatagataaatgggactctactaagctaaaaagtttctgtacagcaaataaaacaatcaacagagtgaaaagataacctgttgaatgggagaaaatgtttgcaaactattcatcctacaagggactaatatccagactatacaaggaactgaaacaactcaacagtaaaaaaaaaagcaagtaatcccattaaaaattgggcaaaggacatcaacagacatttctcaaaagaagacatacaaatggtcaacaggcaaatttttttaaaaagtgcaacgttactaatcatcagggaaatgcaaatcaaacccacaatggcatatcatctttccccacttagaaaggctatttttttttaattaatttatttttttgagatggagtttcgctcttgttgcccaggctggagtgcaatggcacaatctcagctcactgcaacctcctcctcctgggttcaggtgattctcctgcctcagcctcccaagtagctgggattaccagcatgtgccaccacacccagctaatttttgtatttttggtagagacggggtttctccatgttggtcaggctggtctcaaactcccaacctcaggtgatccacctgcctcagcctcccaaagtgctgggattacaggtgtgagccaccgcacccagccatagaatggctattattaaaaagacaaagaaataacagatattggtgaggatgcaaagagcaaactcttacacactgttagtgaaaatgtaaattagtacagccactatggaaaacggtatggaggcttctcaaaaaaataaaaacctgaaccaccataggacccggcaatcctactgctggacatttatcctaaggaaaagaaatcagtatatcagagagatacctgcattcatgtttattgcagcagtattcacaaaagcaaagatatggaatcaactaagtgatcatcgtcaggtgaatggataaataaaatgtaatatatatacacaatgtaatacttttcaaccataaaaaattaaaatcatgtcatttgcctccaacatggctggaactggaggtcattatgttaagtgaagtaagtcagacacagaaagacaaatttttcatgttttcacccatatatggaagctaaaaaagttgatctcatggatgtagaggacagaatggtagataccagaggctgggaaggttgtatgagttgaggggaggggacgaagagaggttggtcaatgggtacagctgatagaaggtgtaagttctagtattagatagcagagtaggatgataatattaatagttatcaacaacttattgtatatttcagagtaactagaagagaggctgggcacagtggctcatgcctgtaatctcaacactttggaaggctgaggcaggcagatcacttgaggtcaggagttcaagaccagtctggccaacatggtgaaatcctgtctctaaaaaaaaaatgcaaaattagccaggcatggtggcaggcacctgtaatcccagctactcgggaggctgaagcaggagaagcacttaaaccctggagactgaggttgcggtaagctgagatcgctgccactgcattctagcctgggtgacagagcgggaccccatctcaaaaaacaaaatgaaacaaaacaaaaaacctgtagctagaagagaaaacttgagatgtttctaacacatagaaatgataaatactcaatgtgatgggtacccccaaataccctgacttgatcgtaacacatttgctgcaacaaaatatcacatgtaccctgaaaatatgtaaaatattatgtatacattttaaaaatgtgactttggagttgaaacttgaagaagatgaggaagccagctgtgtgaatttcaagccagccagctgtcttttctggcagggagaatagtaagtgcaaaggccctgaggagggtgcatgtccattttgttctgagaacaacaagcagggcagaggaagtgggaaagagtgactgatggaaagaatgagaatgaggtcagagaggtaatgaagtgagggcaatacagggctttgtatcagaccccattagagctgcaccttacatgctatcagccatcctttaactccagctactgcttaggcaattagcagcacagatgtaatcccacagcacctcttctgatggctatttatctcttgctccttccccactgtggcatggaacacttgcatgaaccccttagccctgtgcatgccaggaatccttatggggtatgggagcaaatggataattacatccttcttctatcctttgcaggaccattctgagggaatacagagatagcttgttgagattcctcagagggacccagctccaattttgcccattgtggaggtcagctcaataacacacacttggatttcctttccttccttccttgtttcacttttcaaacagtcttcatttggggaatcatttttaaccataaactacctgcacacagccctataccaggctctactttgggtggggaggaaaccagagctaagacaactagtagatcatagtaagaactttggcttttttttttctttttttcttttcttttcttctcttttcctttccccttccttccttccttccttccttccttccttccttccttccttccttccttccttccttttctttcttttctttttggcagtgtctcactctgtcacccaggctggggtgcagtggtgccatctgggcttactgcaaccttcatctcacggcttcaagagattctcctgcctcagcctcccaagaagctgggattacaggagtgcaccaccacgcccagctaatttttgtgtttttagtagaggcagcgtttcgccatgttggccaggctggtctcaaactcctggcctcaagtgattcacccacctcggcctcccaaagtactgggattacaggtatgagccaccatgcccggccagaacttcagcttttactcaaagtgagatgggagccactggagaatatttgagcagagacgtaaggtgatctgacttctacttgaaaaggatcactcactctcacctgctgggttgaggacagactgccttagaaatggcacagtcagggggacaagttaagctactgcaataatccaagtaagagatgatgatgtcctggactaagatggtggctgtggaggtggtgatcaaagttaacttctgaataaatgttgaaggtggagcctatggatttgctcatgaattggatgtgggttagtaccatagacaaaatgtgttccctagtttccaattcatatgctgcaaccctaaccccccagtgtgatggtataaggaggcagggcctttgaaaagtaattacatcatgatagtggagtcttcatgaatgggattagtgcttttacacagaactctgaaatggtcagagttctttccttttgccatgtgaggacacaaggagaagatggttgtctacgagccagaaagtggccctcactagacacagaatctgccagcacctcaatcttggacttcccaactttcagaagaaatattaacaaatgtctattgttgaagccctgcagcctatggtattttgttatagcagcctgagcagaataaaacactctatattctcaagatccactttggaattttattttattttatgaaatgagataagatgaaatgagacagggtctcactctgttgcccaggctggagtacagtggcaccatctcacctcactgtagcctctgcctctcagattcaagctcccatctcagcctcccaagtagttgagactacaggcatgcaccaccacaccctgctaagcttttgtttattttgtggggcacaaggtctcaccatgttgcccaggctagtcttgaactcctgagctcaaacgatctgccctgggccctcctctcctcaaaatagtgctgggtttacaggtgtgagccaccacacccggcccactttgcaattttaatgatagtttttcttctcctacagacccaaagttttcaatataaaattcaaattgcggtgtctaaaattcaatttggtactagagaggtcaatcaaaatcacaagtacagtgaaaaggcttcacagcagtccttcctacgtgtatgttttctccaaatgtaagatgtacctggaaagaaaatctcactatgttggaaaagcctatgcccttgccaacagaaataatttttaagccaaacatgtattagcacaaaagcaggcaatctctattccaaaggaaggttgcaacactccttttctttgtacaacagatgtgtgccagcctttaggttatagaatggttaaacaatctttctcccaaactactgctgacggatcactgactaatcaaagaagaaatgcttcctccaagttagagtgattatttcactctaacttaagggttataactatagggacatagaacaggtaagtccaaagaacagagctgtatgactcaggagcctttgcgtatttttcacaataataagttatggtatctatttattgtattactatattggtaatattggtatttattgtatatattatttattgtatatgttattcattgtatacattattatattggtaatattggtatttattatatattatttattatatataatatacaattattgtatacaatatattgtgtatattattgtatattatatattgtatatatttattgtagatattattatcagtagtatttactgtattgttatattggttatgctaatctgaacaagcagatccatgagtctgcaatacttacacacttgttaaagtgtctgaatgttaaatgaagttgcattgattgcctatatttgtgtttcagcagcccaagtacctgagaaaaatgcctcttaactctaacaaaaattttttacacataaatcaaatctgaacatgacattattatttttttttaatttttattgagacagagtcttgctctgtcacccagactggagtgcagtggcgtgattttggctcactgcaacctccacctcccaggctcaagcaattctcatgcctcagcctcctgagtagctaggattacaggcatgcctcaccacactccactaaatgacttaattttcaatttaaatattgtagaactcagtttagctatctgttggattaaatgtcaggcacactggccaggcgtggtggctgatgcctgaaatcccaacactttgggaggctgaggcgggcggatcacctgaggtcgggagttctagaccagcctgaccaacatggagaaaacctgtctctactaaaaatacaaaattagctgggcatggtagtgcacgcctgtaatcccagctactcaggaggctgaggcaggagaatcacttgagcccgggaggcagaggttgcagtgagcagagtttgcgccattgcactccagtctgggcaacaagagcgaaactccatctcaaaaaaaaaaataaataagtcaggcacatccttaatttactagatcagccttcacatctgtaattgaagtaataatctctttgttaatgttatctataaggcaagggaatactttgacttaattaaaaagaaaatgtctgtgaatgagtatatcttctcagaaaaagcttccttgcttacgctgcaatcaaatcaaagaaacactgagtttgtcagtaaaacccaatagagaacatatttgtaatttaaaaatggttataattgtacaaatgatcattatgtaattaagcaatatgagttcagcacatttgccctgatggaaaaaaaaatagcttttcttttttttttttttttgagatggattctcactctgtcacccaggctggagtgcagtggcgcagtcttggctcactgcaacctccgcctcccaggttcaagcagttctcctgcctcagcctcctgagtagctgggattacaggcgcgtgccaccacacccagctaatttttgtatttttagtagagatggggtttcaccatgttggccaggctggtcttgaactcctgacctcaagtgatcctccaacctcgacctcccaaagtgctgggattataggcttgagccaccgcaccctgtcaaaaataagttttctgataccaaaacaatctctggttttatccagccctatgaccttaggaattttcctaactgatgtttgcttcagtttattcttatcttagatgggtaattcattaagtgtaaaatatttaaaggtaattttaatacacaaagtttttaattttttgtttctgtttattttgataattctctagaaagcccgagtttccctgttcttctcttagccctgccagcagccagctttctgatttggggcaaattatttaaccttggatactttcatctataaaatgtgaggactgatcttcatctataaattgtgaagactgatttgtactatttggttgaaatctaatttctgtgattatttgctttttttattattatttattttatgtttatttattttatttttttgagacatctgtcatccaggctggagtgcagtggcacgatctcagctcaccgcaacctccgcctccccagttcaagtggtcctcatgcctcagccagcctcccaagtacctgggattacaggcatgtgccactacgcccagcgaatttttgtattttttgtagagacgaggtttcttcatgttggcctggctggtctcaaactcctagactcaagtgataacctgcctcggcctctcaaagtcctgggattacaggtgtgagccaccgtgcctggcctatttgctttatttaaagattatcatttgttttccaaaaattaaagatcttgtatatattaaattgatcttttatttttatgtatcgagtttctttctttctctccttccctccctcccttccttccttttctctctttccttctttccttctttctttcttttctttctttctctttctcttctctttctttcctttctttctttctctctttctttctttctttctttctctctttctttttctttctttccttcccctcccttcctccttccttccttcctctctttctttctttctttctttctttctttctttctttctttctttctttcttcctttcttccttctctctctctttctttctctctttttctctctttctgtctttataaaaagacagggtcttgctctgtcacccaggttgaaatgccatggtataatcatggttcactgtagtcttcacctccagagatcaagacattctcccactgcagcatcctgagtagctgggaccacaggcacgtgccaccatgccctgctaatttttttttttttttgggttgggggacggagtttcgctcttgttgcccaggctggattccgatggcgcgatctcggctcaccacaacctccaccttccgggttgaagcaattctcctgcctcagcctcccaagtagctgggattacaggcttctgccaccacgcctggctaattttgtatttttagtagagacagggtttctccatgttggtcaggctggtctcaaactcccgacctcaggtgatctgcctgccttggcctcccaaagtgctgggattacaggtgtgagccacagtgcccggccttccagctaattttttaattttttgtagagatggggacttgtcattgtggccaggctgtgtattgagttctaaaatctataaagttagaacaacagtgaaagacttcttttgtcatatggtgaaccccaacattggggttcagcctgggaggctgcatgggttcttggctttgcatagaatggaattcaagagtgagcttatgaaataaagtgaaagcaagtttattaggaaagtaaaggaataaaagggtggctaatctataggcagagcaaccctgaaggctgctggttggctatttttatgattatttcttgatcatatgctaaactaggggtggatttttcatgacttttccaggaaaggggtggggaattcctagaactgagggtccctccccttcagaccatgtggggtaacttctggatgttgtcatggcatttgtaagctgtcttggggctggtgggagtttcctttagtaggctaatatattataattagcatataatgagcagtgaggacgaccagaggttgctttcattgccatctgggttttggctgccttctttaccgcatcctgttttatcagcagggctttcgtgacctgtactttgtgaaaccagtcttgctgaactcctttcttactttgaaatggacaaagagtactgagtgtcctgtctagaacaccctttgggctatctccacctttcattgtctttgagctattttataactccgtaagatataaaatacagatagtgatacaaatgattcttatctgcagaaatgcaaattgtgttcactgatatgcaattgaacattgcctttggatattaacttgttttacatttacatttatttattcactccagcattcctaatacctatacatgtgtagtctttgaattctcctttgactcagttctaacatcttattcattgccttattaattaataagttaaataaaatcttgcacgtgttcattttatgtttgtatttgagtcatgattttaacctttctaaaaagtatcctttatgtacacataatctgggaggaaaagaaaaaattatcctttttttttttttttttgagacaagatattgctctgtcacccaggctggagtgcagtggcatgatcatggctcactgcaacctccacctcctgggctcaagcaatcctcccacctcagcctccagagtagctgggaccacagacacatgccactacatttggctaatgtttgtattttttgtagagacaaagttttagccatgttgcccaggctggtcttgaactccttggctcaaaggatcccctacctcggcctcccaaagtgctgggattacaggtatgaaccactgcacccagccagaaattatcctaaaatttacccaaaacagattactgtaaggatgaaataagatgacacgtaataatcacttatagcacactgcctgagacataatgatagaattattatttgtatttaatctactgaccaaatgagctttcattctggttaacaagtatcatcttcacagctttcttttctttctttctctctctttcttgctttcttttctctctttctttctttctttcctttttctttctctctttctctttctctttttctctctctttctctctttataaaaagacagggtcttgctctgtcacccaggctgagatgcagtggtgtaatcgtggttcactgtagccttcacctccagggatcaaaccagaattaaaaatacaataacataaaagatttagctgagatggtttaaaaatagtgaagaccacagtagacttaagagaaagacttacatttcattaaaatacatatattgtgttatcaatgttcaagtattgatatctcacttaaaaccatgttttgatttcatattaaatgcttttgaaatccgcaaaggggctagcagagatttattactacctgaagtgcctaggggtgcagaggctcaggaaaaactcctggaaatatatgcagtggagtttgaagggaaccatcttcccactgttcacagttctctcacttacagagatcactcacttgttgcagattaattaataatatggcttttgtcaccatggggggaaatataaggggaaagggcaaataagagtcaaagtaagggagtaaaaattaacttccaggctaggtgcgatggctcacacctgtaatcccagcactttggaaggcctgggcaggcgaattgcttgagctcaggaggttgagactagcctaggcaacatggcaaaactcaccaaaatttaaaaaaaattagctgggcatggtggcacacacctgaagtcccagctactcaggaggctgaggtgggaggatcacctgagccccggagtttgaggctgcagtgagccgtgattgtgccactgcactctagcctggaagacagagtgagaccctggctcaaaataaataaataaatagatataaaaataattgtccaactgtcatattttttaaaagtctccaagcctaacttatcacaaaaataaacagactttgcagtgcagataagtgaagaatattttctttctgtatgtgtttctatattattccattgagcaaagaaatctgagctggctagcattcaagatatggtttggataaagaggaaggcttcctgattacaagcttataacatactccaacaggttttctaggaacaagattgggcttcattgaaatacattaaataggttgtaagatgaaatgagaagggtgaaagtggcaatagaaatgtcttcaaagaacatctctcctgaatactaggatgagcaaaataaacatgcaaactgctgacaaaaagagttgaactctgtaaaatatttgaagagatttattttgagccaaatttgagtgaccatggcccatgccacagccctcaggaggtcctgagaacatgtgcccagggtggtcggggctcagcttggttttatacattttagagaggcttgagacatcaaatacatttaagaaatacattaggccaggtgcagtggctcatgcctgtaatctcagcactttgggaggccaaggcgggatgatcacctgaggtcgggagtttgagaccagcctgaccaacatggagaaaccccgtctctactaaaaatacaaaaaattagctggacgtggtggcgcatgggtgtaatcccagctactcagggagctgaggtaggagaatcacttgaacctgggaggcggaggttgcagtgagccaagatcgcgccattgcactccagcctgggcaacaagagcgaaactccgtctcaaaacaaaacgaaacaaaacaagaaaagaaaaagaaagaaatacattggtttggtccagaaggtggaacgactcaaagtagtggggggcttccaggcaataggtgaatttaaacattttctggctgacaattggttgggtttgtctaaagacctgggatagacagaaagggaatgttcaagatagagactgtggagaccaaagttcttttgaagttttatagtggctgcctttagagacaatagatgacaaatgtttcctgctcagatcttagttaatctctttaggattgggaggatctggaagaaaaagatctagctatgttaatagagattctttacagatacaaattttcccctacaaagaacagctttgcagggccatttctttttttcttttcttcttcttcttcttcttcttcttcttcttcttcttcttcttcttcttcttcttcttcttcttcttcttctccttctccttctccttctccttcttcttcctcttcttctttcttcttttttttcttttttttttgatggtgtctcgctctgtcgcccaggctggagtgcagtggcactatctcggctcactgcaaactctgcctcccaggttcaagcgactcttctgtgattctcctgcctcagcctctggagtagctgggactacaggcgcgccccaccatgcctggctaatttttgtatttttagtagagacacggtttcaccatattggccaggctggtctcgaactcctgacctagtgatctgcctgcctcggcctcccaaagtgctgggattacagacgtgagctactgcgcccggccagggccatttcaaaatatggcaaataaacatgttctggggtaaaatattttgatttttttctttgtcttgtaatgttatgccagagtcagtttggaaagtaaatcatgatatatagagttaactaaaatccatctgaatttatgactttttagggcatgactccccagactccttagataggaacttgggcaagataaaattttttttttattttttgcccccaaaatcttttgagtttagtccccaaaacaaataaagaaatgcaaccaacatttattaaatactgactaggtgccaggtactattacagccaggaaattctctgtccttgggaagctcaccttgggagggggtgaggatcagagcaggagagggggacagggaatgaaatgaagtaaatgacatggtgtattggaaagtggtaggtgctaggagaaaaatgaaaacatcaagcagggaaagggctgagggctgcagttttaaatagtttggtcagaggtcagtttgaggtgatgtttgagcaaagacaaggaggggaaggagcaagccctaagcatgtggggtggggtggggggaggggagaatgtttcaggtagaaaaccctgaggcaagtaaacgcccctgcttgaagaataggaggtcagctggcctcagcagaatgagcaaggtcaagaaaagtggacaaaggcagaaaagtaatggggtaaggatggaggcagatccttgtgggcccagtgagccagtcagaagtctttgattttcaatctcaatgaaatagggagctactggagaatttgaaaccatggggcgatatcacctgccttaaatttctaaaggatcactggggggagaaaaggcatcagcaattgtgatccaaaagtgaaaggggtcaacagagaaagagatggacaagtctataacgagaaacagagaagtgcttgtctctaaaccttgttcctatgccgccctcaccccaacctcctactgccaaaaggcatattggaaagaatcctcccccaaatctggggacaatcaaattgagttggttcatttgctttttttctctttgaactgaagattagtaaaaactattgttgaaggggcaggggcgagatagaggaatgaacaaggaggctcagtctccaatggatataaaactcagggccacacaaatcgagtggaatgacgcaaaaggtgaataaacagatgacatgcactgtagaaaaagagacaagaagtcacctgtactatatcaggacaaacacgaggtccaggtagagccatgcgaatcttagcaaaagcaatagcttggtaacaatataagtatcctatgggcgaagagggaatgtagcatgaaagaggcaaacagccaccttaaaggaaatcataggtcaacaacaatataaaaagggataatattcacccaaggaaaagcattacaagattcaaaacaacgtaattacaccaccaaatttaaaaaatctgaaataacaaataacaaaatatatactattgagaattgaattactgacatagaggaaaggctttagataatcaacgtaaatgaatataaagaatatagagaatgaagcaataaatgaagtcgagaagattcaggacacatggctgggcactgtggctcacacctgtaatcccaacactttagaaggccgaggccagaggattgcttgaggccaggagtttgagaacagcctgggcaacatagtgagatccaggttctaaaaaaaaaaaaaaatttttttttttaaaagagagatccaggacacagactaaaataatccaataaaaataatttctttccctgaaatagagaccccatcagatggtataggagatgtatttaaaaatagacttcaagagaatatcctatacatctagaaaaaacttcatctctcaatttacaaggacacagttttttcctaggaaagtctgataaagaaggctcaaattcaacatgatgactgaatctcaatgatagaagaattctctaggcatccaggtagaaaaagcaaatcaccttcaagaggacagagaaaaagttggtgttagacttctctataacagcctttggagtccaaagatgataaagcaaagtccacaaacatgctactcaatgcggagtctgcagatcagtagcatgaacattacctggaagcttgttaaaaatgtagaatctcaggcccagtgccagacctactgaatctacattttcagcaagcccccagaaaattccctttgcatattgaagtttgagaattattaacctacaaagcttttatggaacgaaggtattgccaggaatattcaattgcagttattgtcattccatttataagatcatattctcaaacatgaaatgacttagggaattagcccccaggtgcccttctgaatgcttgacaacaaacattcatgtctcaaaaaagaattcaaaaacaaagaagcaagaagtgaaaatactgtgataactttgagttcatctgaatatagagcaaaaacagccatgacagttgtagtcaaggaagttaatgtgaatgcaataaactggatgaagtaaaaatgatataacagggaagagaaaagaaagaatattttactctttcacagaagacagactatacatactgtctaaaatcgaagcatattatgttttctaaaaagcataatgactccaatatcttaatgtttctattgtttacacttgttccttaaaaaaaaaattaaccgccgggcgcggtggctcacacctgtaatcccagcactttgggaggccaaggcgggcggatcacgaggtcaggagatcgagaccatcctggctaacacggtgaaaccctgtctctactaaaaatacaaaaaaaaaagttagctgggcgtggtggtgggtgcctgtagtcccacctactcgggaggcagaggcaggagaatagcgtgaacccgggaggcggagcttgcagtgagctgagatcgcgccactgcactccagcctggggaacagacagagtgagactctgtctcaaaaaaaaaaaaaaaaaaaaaaaaattaacctacagacaaattttaggaaatgagttcatccgtggtgaaaagacacaagaaattcaacaatttcacttccttttatttttgttatactaaattcaagaaaatttaacattttagttatcatttttataggtttttttttttttttgagacagtctctctctgtcgcccaggctggagggcagtggcgtgatctcggctcactgcagtctctgcctctcaggttcaagcaattctcctgcctcagcctcccaagtagctgggattacagccatgtgccaccatgcccggctacttttttttgtatttttagtaaagacttggtttcaccatgttggccaggctggtttcaaactcctgaactaaggtgatccacctgcctcggcctatcaaagtgcgaggattacaggcgtgagtcaccacacccagcccatttttatagtcacagcatttatagttaacatttttacaaaagcattttgatctttctctttttaaccctccatccatccatcattgatctttttttttttttttgagacggagtctcgctctgtcacccagactggagtgcagtggcatgatctcggctcactgcaagctccatctcctgggttaatgccattctcctgcctcagcctcccgaggagctgggactacaggagcccgccactacgcccagctaacttttttttttgtatttttagtagagatggggtttcaccgtgttagccaggatggtctcgatctcctgacctcgtgatccgccctcctcggcctactgaagtgctgggattacaggtgtgagccactgcgcccggcccatcattgaccttttatcagcacatatgcacaaagagttgcatgtgcattcgtggtatctagaatgatgtttaatgttgacaacacaagtatttaaatgttcatatttttatatttcttccttttctaacttatttcaaaagaacatgtataatttaaaaaataatatagcaaaacaaatatgagaagacataaatagtagttaattagccaggtgaggtggtttgcatctgtaatcctgactacttgggaagctggggtgggaggatcccttggggccaggagttcagggccagcctgggtaacatagcaagaacctgtcttttaaaaaaagaaagcaagaaagcaaagaaggaaggaaggaaggaaggaaactaaaaaaaattagccggacgttgtggtgtgtggtcaaggctgcagtgagctatgattgcaccactgcactctagcctagaggacagggtgataacccatctctaaataaataaataaataaaaataagcaaataaatagtagtgggtttttttgttgttgttgttgtttatttttgctgtttttgtttgtttgtttttttgagacagggtctcactttctctcaggctggagtgcaatggtgtgatcatggctcactgcagcctggacctcctgtggctcaggtgatcctctcacctcagcctcctgagtagttgggactacaggccctctccaccatgcccagctaactttttgtatttttttttttttttggtagagatggggttttgccatgttggtcaggctggtctcgaactcctggactcaagtgatccacccgccttggcctcccaaagtgccgggattacagatgtaagccacggtgcccagccaataaatagtagttaattgtaggtggcagaaaaaaaaaagttgattctcttatttgattttttatctaatttttattttaaaaaaatttagccaagctttatgtcagagctgggcttcagtcccatggccttaagtaggggaatggagaggcagaagtcaaggccaaagcacatctaaagtagggggtcttagaagtctctctccctccatataatagccaggattcccaaaggatacactctcggggtaaattaaactacaactgacctatccagcatcccagccacagagttgcattggcataaatattcccttggtatggaagagaagaaaatgggatagagataaaattactattcttttttttttttttttttttttgagatggagtctcactctgtcgccaggctggagtgcagtggcatgatctcagctcactgcaacctccgcctcccggtttcaagcgattctcctgcctcagccttccaagtagctgggactacaggtgcataccaccacaccctgctaatttttgtatttttagtagagacagggttttgccatgttggccaggatggtctcaatctcttgacctcatgatctgccctccttggcctcccaaattattgggattacaggcgtgagccaccacgcctggacaaaattattattcttgacatgataaggctacaaaccagcagatctgcactctaggtatgcccaactgagatgggatggggactcccaagccttgaagttggtttgagatggttcccaattggtagttcactcaagtacttgcagataaaataacagatctctcaggaagaggctaccatcatcataagcactgaagaatcctcacagagtttttcaaggacaatggccagcgctccatcaatgatgataacccagatacaggtaacaaggcaacatgaactcaaaccagcagaaacagagacagcagaaacagtcccacaaatggccacatacagattataaaacaaatatcctcaatgtgctcaaaggaataagtgacgaaagcttgggcatatttgcaggcagcatgaacctacaagactgaccttgaagattagaaaaataaccaaacagacccagactgtctcaaaataaaaaatgtaatagctaaaatgaagactcaacagatatgttaggaaacagataaaacaaggtagtggaattagttaatgagaagattgaagtaattactcagaatttcagctcagaagaaaaaaatatgcaaaatacagaagacagcttaagagatgtggagaagcctaacacatttgatcaattatagaaggaaaagggaaaagtaatggaggcaatatttgaagagataatggctgaaagtgttccaaaattggtgaaggtaccaatccacagatttaagtggcttggtaaatcccaagaaggcaaataagaagataaatacgatcatatgcatcagattgttttaaccacagtgaagctggggtagccatattgatatcagagaaagttgactttaagacagaaaggattagtacactagggataaagtgggttgcttcattaggattaagcactcaatttaaaaggaaggtaatcattttacattttatatgcagctaataatacagcctaaaaacatataaagagccaggtgcgatggctcacgcctataatcccagcacgttgggaggccgaggcgagcggatcacctaaggtcgggagttcgagaccagcttgaccaaaatggagaagccccgtttctactaaaaatacaaaattagccgggaattgtggcgcatacctgtaattccagctactgaggaggctgaggcaggagaatcgcttgaacccaggaggtggaggttgcggtgagccgagatcgcaccattgcaatccagcctgggcaacaagagtgaaactctgtctcaaaaaacaaacaaacaaacaaacaaaaaaatatatatatataaagaaaaaaaagaaccaaaagaagaagaaaaaaaatctgtaagttatattataaaaacaaaacgaaaacaactgtttcagtaattgatggaacaaacacattaaaatgtcggaacagagagatacagaagatttgaacaacatgattaacaaaacttgaactaatggacatttatagaccatggcttgcaaccacagtggaatgcacattcttttcaagaatttacatagacatacatgtacccaagatgctcttatataatttggaacaaggcatggacataacaccatacacatatacaaggatgttcatagtgtaattatttataagagccaaaatctggacacaacccaactatgtatcaacagtatactggataaacaaatccataaaaagaatattattaaaaaaacaaaatgtgctgggtgcggtggctcatgcctgtaatcccagaattttgggaggcctagctgggtgaatcaccttaggtaggagtttgagaccagcttggttaacatggtgaaatgccatctctactaaaaatacaaaaattggccgggcatggtggtgggcagctgtaatcccagctactcaggaggctgaggcaggagaatcgcttgaattggcgaggcggaggttgcagtgagctgagattgcaccactgcactccagcttaggtcacagaaggagactctatctcaaaaagaaaacaaaacaaaaaaacccaaaacgaactatagtcacacatgccaacatagaagtattacgcaaacataatcttgattaaaagacacaaaagcaagatacataaaaagagatatagcatgctttcatttatataaaatatgataaagggcaaaactcaacagttgtatttagattcttagagatataaagaaatccaagagagcgatttccctagaagtcagaatatcatagactgggcgtggtggctcacacctgtaatcccagtaatttgggaggccgaggtgggtggatcacttgagtacaggagtttgagatcagcctgggcaacatggcgaaaccccatctcgactaaaaatacaaaaattagctgggcgtggtggcacatgcctacaatcccagccactctgggagctgaggtgggatgatggcttgagtcctggaggtggaggttgcagtgagccaagatagcgccattgcactccagcctgggcaacagagtgagaccccatcacaaaaaaataaataaataaataaaaataaaggtcaaaacattaggataatgagtacctatggagtgagggaaagggttgtgattagaaagttaccatagaggagcggcttctgtagtgagagcaatattttacttattaacgtggatagtgggtgttcattataatttataaagttggctttatatgttgaacaaaaatttctgtatgtatattatgtttctttttttgcatttaaatagctgatctattttttatttattctaaagtatgtctgaagaatgggtccaacttttaacattttttatatagctatccacatatcactatatttggtacttaaaagttgatctttcccccatgagtttgcaatgtgctgggttttttttgtttgtttgtttgtgtttgtttgtttgtttttgagatggagtctcgctctgtcgcccaggctggagtgctgtggcacgatctcagctcactgcaacctcaggttcaagcaattctgtctcagcctcccaagtagatgggactacaggcgcccaccaccacaccccgctaatttttaaaatttaaaaataatttgtatttttagcagagaggggttttcaccatattggtcaggctggtctcgaacttctgacctcaggtgatctgcccaccttggcctcccaaagtgctgggattacaggcgtgagccactgtgcctggcacaatgtgcctttattaaagtatactaaattaaaaatacaagtggatctaattctggattttctattctgttccactggcccatctactcatgcgccaataccaagatggtttaattagagaagatttagtgcctagattctcaacttcaacaccattgacattttggaccagataattctttgctgttgagggctggtctgtgtaatctttggcctctacctactaaaatccagtagtgccccctgtctctacccttactcccactcctggctatgacaatgaaaaatgtctccaaacactggggggcaaaatagtccctggttgagaatcactgctttggagtatattttaatatttggcactgccatctccacccattgctctattttgtcttcttggttgtttaattctcccaaatgcgttttatacaccacatgtctagttccaggagaaaacataatagaatttttaatgacattgcattgaattgataagttaatgaagagaaaagttcttcatgatattgagtattcctatccaagaacatgaatgtgtatatttatttaagtttatctttgtgtcttccaggaaggttttatagtttttcttatgtaagcttctgatgtttcttgttagttttgctattactgggtaattttgcgttgtattctggacattatggattctgctattttcctccaagtgttgatatttatgttttagttggcaattaacttggttcaactcactgactctgtgtgggaggtacctcagatctcagttcagactgccttcagctggttctgttcttgcacgatcccaaggtgagccagagacttggcagagtttttacacagactttgggatcctccatctctcattttatcttttctgggattctcccttccctctctgaatgctctgattttcctgagccctttctttgattcctctgaccagaaggagttcaaagcacggatctttggtgtattagtttttgtttttttttttttttttgagatgggatgtcacactgtcgcccaggctggagtgcagtgatgcgatcttggctcactgcatcctcctcctcctcctcctcccaggttcaagcaatcctcctacctcagcctcctgaatagctgggattgtagacgtgtgccaccatgcctggctaatttttgtatttttagtagagacaggatttcaccatgttggctaggatggtgtcgaactcccgacctcaggtgatccacctgtcttggcctcccaaagtgctgggattacaggcatgagccaccgtgcctggcctcgtggctagctttatgcaggttggatttctcaagtattattagacattattagaccatatcctatcacgacctcttgcacacagttataaactggatacagcagaatccttcctgatttgagctgatgttctcagtgagtgcctgtcagtgacttagggatccttttttacacagactttgggatcctccatctcttattttctcttttcagataccacatttttttcctcacttcacccaaataaatggtgattccacacagaccttgtaggtttgggtggtatattcgttttctaggtctattgtaacaaatttccacaagctgcagggcttcaaataacagaaatttgttgtctcacagttctggagttcagaagtctgcagggtcatgctctctctgaaggttccgggggaggatccctccttgtctctcttctaactttcagtggttgccggcgacccttagcatcacttggcttgaagacacatcactccaatttcgcctccattgtcacatggcattctccatatgtgtcttctctgtgctcaaatttctcttgtcttaaaaggacactaatcattggattaaggcccaccctgtcccgcatgatctcatcttaacttgattgcacctacaaagatcctatttccaataaggtcacattcaaagatactgagtaggatttgaacatacctctttgaagatacaattcaacctagaataggtgttttccctcaatggaacctactggaggaagagggcatggggataacgtgtagagttttgttatggagtccattcagggattttccgtctattttcctaggtggttttttttttttcttttttggtcaggaatggggagatttctaaaaggtgaaagcactggatacctaaggaatagagtgggttgaatagggtttgtagtggaagaagagggtgttggtttaagggaataaaaaataggccgggtgcgttggctcacgcctgtaatcccagcactttgggaggccgaggtggtcggatcacgaggtcaggagatcgagaccatcctggctaacacggtgaaaccccatctctactaaaaatacagaaaattagccaggcgtggtggcgggcacctgtagtcccagctactcgggaggccgaagcaggagaatggcatgaacccaggaggcggagcttgcagtgagccgagatcgcgccactgcactccagcctgggtgacggagcgaggctccgtctcaaaaaaataaaataaaataaagaatacaagatggtggactgaaaacaagtttgctttagacattagtatcacccaagacacatctaaattgtacttctaccctaaaacaggctggaaaaatacctattttaaaattaatgagaaatctggagaaaaatttttgtattttaaattttttgatcgtgcagtggcatgatctcggctcactgcaacctctgcctcccgtgttcaagcggcccgcttgcctcagcctctagagtagctgggatagctgggactacagccatgtgccaccatgcccggctaatttttgtatttttattagagacggggtttcactatgttggacaagctggtctcgaactcctgacctcaaatgatctgcctgccttggcctccaaaagtgctgagattacaggcgtgaaccaccaggactggctgaatttagaggaaaacattttaaatatacatcttagactccatatttctaactataatatttactttatatataggaaaaatattttacttgtgtatagagaattgaatggcttgtataatatcacataaactgtaaattagaatacaattcactatgctcttttatgcagtaaatacatcacattatctcagaatggtgttgcttattttacatttatttcttttaaaaaatggaaaactgtcagctgtggtggcttagcctgtaatcccagcactttgggaggcccaggcaggtggatcgcttgagcccaggagtttgagaccagcctaagcaacatgatgaaaccttgtctctatgaaaaatacaaaagttagccaggcatgatggtgcatgcctgtaatcccagctacttgggaggctgaggtgcgaggatcgcttgagcctgaggaagtggaagcacgctagcctgggtgacagaatgagaccctgtcttaaaaaaaagaaagaaaagtaaagaaaaactaaaatgatatgaaatttttaataaatggaaaaaactcatcctgtttttcctactattcttggaccaaatatatatatatatatatatattttttggcctatcatcttccaatgttttttccattttcactagtatttttgtatagttgcaagaaatcatggttcttgacttttaaataaaaagtaaataagagtaacaattatgtataattaaggaattcagttaaaagaaacttaattgctttgcatttcacttgaaataaagtccgtaatacccagggaaatttctaagtcttgtcagcttcttcttggaatcttccctcatgagttgctgataatggtcttacaactggtctgttttcacaaaagcatgttatgtcattaaacaccagtctgctgtacaccggctcaagctaacaacttgaactcaaacattattatcagtcaatgtattaatcttaataagttaacaattataaatgagctagataatttctgtgaccaaccatgattcctaatacatagattactatcaaaaaacatatacatgtggtgaaaaagagtaccctcaattcagctataaatgcctgtgaaatgaaatcatctagacacataacacagaagcagaagtgcagagtaaagaatgaagtttggctttggaaaggactgggttcagatattaagtcctccatgtgttgactactgaaggtacttaaacctccctaaagcttcagcttcatgggtgaagaaaatagaatttatttcataggggtctgatttttggagacagggtcttgctatgttgtccaggctggtcttgaactcctggctcaagtgatcttactgcttcagcctcctgagtcatagggttcttgagaatgtgataaaattaatacagtggccaggtgcagtggctcattcctgtaatcccagcattttgggaggccgaggtgggtggattacttgagctcaggagttcaaggccagcctgggcaacatagtgagaatttatctcccatttctgcaagaaaatacaaaattagccaggcgtggtggcattagcctctagtcctagctatttgggaggctgaggtgggaggattgctcgattgagtattgaattattcagttgttgaataaatattcaaggagtaataggtcatatagagatactattctataaagtatgcttctaattcatctggcctgactatggttgcttgaatttttttttcttttcttttttttttttagacagagtcttgctctgtcatcgaggctggagtgcagtggcagtgatcttggctcactgcaaccgctgcctcctgtgttcaagcaattcttgtgcctcagcctcccaagtagctgggactaccagcatgtgccaccatgcccagctaatttttgttttgttttgagactgagtttcactcttgttgcccaggctggagtacaacggtgcaatcttggcttaccgcaacctccgcctctgggattcaagtgattctcctgcctcagcctcccgaatagctgggattagggattacgggcatgtgccaccatgccaggctaattttgtattttcagtagagacagggtttcatattgcccaggctggtcttgaaccactggcctcaaatgatctgcccacctcagcctcccaaagtcttgagattacaggcatgagccaccatgcccagtcttgaatcttgattgtaaccatcactgtggtctatttgattgtggtatttacctttaaaaacacttgaatagaactttcaactcatggcttcatcaggataatagaaattagtggttataaatgatacaacttcatatagtttagtacacatttaatttatgcatataggctgggcgcggtggctcacacctgtaataccagcactttgggaggctgagacgggtggatcatttgaggtcaggagttccagaccagcctggccaacatggtgaaaccccatctctactaaaaatacaaaaattagccaggtggtagtggcgtgaacctgtaatcccagctactcaggaggccaaggcaggagaatcacttgagcctgggaagcagaggttgagcctgggaggcagagtgagccgagatcgtgccactgcactccagtctgggcaagagagtgagaccctgccttagaaaaaaaaaaaaaaaaagaaagaaagaaaagaaagaaagcctttagtagaattgattctattttatttggctcttgaaacatgtcagaccattttgtgggggagggcattcaaggaacaaagacaagctaaaaatgttgagaacacattttgttcccaatagtctagttagagggaaaggctctttgaaggagaatggcaaatagatttggacaggaagtcagattatgacaagtcttatataccatgctgaagagtttgaattctcactgcaggtgtaggtgtgtaagatgatgagccactggaacacagctttacattgccatttagagtacgtttgcattgcagcagctacacagataatagatggggactgggtgacaagaaagggcccctaaagtagtatcccttcacttcctcttactcctctcaatctgcagtgcagtccttgagcctcacaaatcaattcctctgtgctacagccatgcattctctttatggcaggcatcgtactctactgtgcttgtttatttatgcacttgcatccttagttagattgtaaatttttgaaggcagatgccatattgcactcacttttgtacactcaggatctagcctgacctctagaagatagtaagtattcaataaattcatcattgcatgcatccagtaatcatttggtgagtttctactatgtgtttcctaggaactgctataagcactgagtgtatgacagtgaacaaaataaagaaaaatccatacccttgtggactttgcatactaattcagagagacacacaataaataagcaggtaaacaaataaataaacaagtaaaattttagtatatcagatagtaataagggttacagtaaaaacgaaatgagggaggagagcagagagtgcattttgaaataggatggccagagaaagcttcactgtgaaggagacattagaaaacagacttgaaaattgagagctcaagctttacggtatcttaggggaaagattgtaggccaaaggaattgacaaagcaaagacctgaaagaggacagtgctggcctggtgccgtggctcatgcctataatcccagcactatgggagactgaggcaggcggatcacgaggtcaggagttcgagaccagcctggccaacacagtgaaaccccgtctctactaaaaatacaaaaattagctgggtgtggtggcgcacgcctgtagccccagctactcgggaggctgaggcaggagaatcgcttgaacccggcagctgcagtgagccgagatcgccccactgcacaccagcccgggtgacagtgtgaatctttgtctcaaaaaaaaaaaaaaaaaaaaaagaaagaggacagtgtgaggttttcaagaagtagcaaagaggccaatgtggctgcaacagcgagtcctgtaaggctgctttgaagatcttgtaatgattttagcttttattcggagtggaatgggaagccattggagcgttttgagcagaggagtgcataatccgaatgactaattcaacataataactttggcagccattcaggaagagtctgaagaagaacacatattcttctgggcaagaagaggttgtctggaccagtgtggttgaagagagacgtgctggatagtttatatagtttgaaagtggttttcacaggatttctggccaggtgcggtggctcgcgcctgtaatctcagcacttcaggaggccaagacgggcggatcacgaggtcaggagatcgagtccatcctggctaacacagtgaaaccccgtctctattaaaaatacaaaaaaattaaccaggtgtggtggtgggcgcctgtaatcccagctactcgggagactgaggcaggagaatggcttgaacccaggaagcggagcttgcagtgagccgagatcgcgccactgcactccagcctggacgacaaagtgagactctgtctcaaaaaacaaaaacaaaaacaaaaacaaaaaacagagcaaaacaaaaaaacaggattactaatggctaaatgggaaagtgagaggggtgaagaatgtctctaagttttcgcatgagcaactagaaacatggagttgctatttactgagataaattgggtgaccatttaattcactgtcaaattacaacactgttgagaatgaaaagggatgccatacacttgggaaaacacctgtaatccaggactatcttagaaaacttcttcacccttgggctgtggttttcaatcagggatgactttgcccgcaatgggacatttagcaacatctgaagatatttttgcttgctatgactaggggactgcagagcacagtcctctaaaacaaagaattaactggcacaaaatgtcgatagcgctgaggctgagaaactctgccctagaactaggaaagagaatgagaaggctaggtttgctgaaatgaatggagataaagatcattaaaattgaagagagaaattacaaggatgcttattcttcattcattgatcatttctacccagcatactttcaaaaagatatgaggccatttagcaaaaaaggcatctagtcatgaatgtaacaaagtattgattaagcaattatacatttagaagaatttatagagccaatcagccttaagattacaactagggaaggctgggtgtggtggctcacacctgtaatcccagcactttgggaggccgaggtgggtggatcaccaggtcaggagatggagaccatcctggctaatatggtgaaaccccgtctctagtaaaaatacaaaaattagccaggcgtggtggcactttcctatagtcccagctacttgggaggctgagacaggagaattgattgaacctgggaggcggaggttgcagtgagccgagattgtgccactgcactccagcctgggtgacagagcgagactctgtctcaaaaaaaaaaaaggttacaactagggttttactgggaacttcactcactttccttctttctttcctacttttttattgcataaaaatgacataacataaaatttaccaccttaaccatttttaagtatacgttatagtagtgttaactatatgcacattgttgtacaacgcatgtctagaagttttttgtcttgcaaaaccaaaactctatactcatcgaacaattccccttttttcctatgcctagtctctgtaaactaccattatacttctgatttctatgaatttgactgctttagatacctcatataagtgaaatcatactgtatttgtctttttgtgactggtttatttcacttaatgtcctcacagttcattcatgttgagatatgtgacaggatttcattcctttttaaagctgaatcgaatcccaattgtatgtatatacattttctttatctactcatctctagatggacatttaggttgcttccacctcttggctatccggagtaatgcggcaatgaatatgggcgtgcaaatatctctttaacatctgttttcaattcttttgaatatatacccaggagtgggattgctgaatcatatggcaattctatttttaatttttgaaggaaaccccacactgttttccatagtgcctacacccttttacattctcatcaacagtagacaagagatccaattggtctacgtcatcactaacaattattattttctgtttatttttttttgtagcggccatcctaataggtgtgaggtggtatctcattgtggttttgttttgcatcacttaattgtggttttgttttgcatcagctatcttttcttttgccagaggctcagttcagctacaacatcattggttctgatagcttcttggattctcaaagtatatagaaaagggggctaagggtaactttaagcaaaatgattgccatgatcgccacacctctaaatagagtgatctgtaattggttttacaatcaaagtttttcctatcagtgacaagtgggtaaagctctcaggaagaataagatcatcaagtcagatggccaaactcattccttttttttttttttttttgagacagagtctcactctgtcgcccagtctggagtgcaatggtgcgatcttggctcactgcaacttctgcctcctgggttcaaatggttctcttgcctcagcctcctgagtagctgggattacaggcatataccaccacgcctggctaatttttgtatttttagtagagatggggtttcaccatgttggccaggctggtcataaactcctgacctcaggtgatctgcctgccacctcagctccccaaagtgctgggattacaggcatgagccaccatgcctggtgcccaaactcattcttatccccacttcatcttccctgcaaagcagaatgaacaaatgggtgtgtgaatgaacaagtaagtgaatacatgaatgaataaataaatgaaaacacctttaacattggtagcagaactcaagagactgactaccagatctctgaaactatccttttcttctttatctgcccggaccatctgtgaagttataactgaaacctcacaatagctgacctcaaagctctcttttagtctcagtttaggtccttgtatttttttttttttttttttttttgagacggagtcttgccctgtcgcccaggctggagtgcagtggcgcaatctcagctcactgcaacctccgcctcccaggttcaagcaattctcctgcctcagtctcctgagtagctgggattacaggcgcccgccaccacacccagctaatttttgtatttttagtagagacggggtttcaccatgttggccaggctagtctcaaacttctgacctcaggtgatccacccgcttcagcctcccaaagtgctgggattaccggtgtgagccaccacgcccggccagctcctcgtatttttattcccctctcctttcttttctccaaccaaatttagtcattgaataagacaactccaacagttggatatacctgattgaacatggtagtccgttagctgctggaatctgagattggcatgccagctaactattagctataaagcaaattatttattttatttatttaattttttgagacagagttgcactcttgttgcccaggctggagtgcagtggcgcaatcttgcctcactacaacctccatttctcggcttcgaggaattctcctgccccagcttccccagtagctcggattacaggcacgtgccaccacactgaactaatttttgtatttttaatagagacatggtttcatcatgttggccaggctggtctcgaactcctgagctcaggtgatccgcccacctcagcctcccaaagggctggaattataggcgtgagccactgagcccggccaggtttttttttctggtagaaatttcatgaaggcttagatcggcacctgcctctgcctcttcctccttctagtttatgctcaggtacacgagagcatttacggtcattacataacatggtacaaagcaggggtagggtgtttacacatgcggaactctgccgtgcatctgaaatgtgacagagacgagtttaggcagaactgtgcccccaaagataggagaacttcaggggaagttggtggagagagtaatcaaccaagatctgtgttctgttcattcgggttagattttatgaaaaagaaagagagctataaaatatctgtgcttcttggcaatgcatgggtttctgtatttgattattagtcgggtagctatgaaaatgttaacatgaatattatttctatatatgttgcatgtgttctacagcacaacaccattggcacaattacagagcaaacaactccatgtaaacattaatgggaataacagaaggaacaaagataacgcggctacttttgaactttggaatctcctacgttgctagtgcatgcttaacagcatgcaatcatcttgggtagaatcatgagggtccaaatgtgtggcaattctaccctcagcccgacacatccactcaaagtaaaacaaaataagcaaaatggctatcatgtgccaaaaggattaatatgtcatccttactggacccttttccttacttccatttgaagaaatcaggtggctcattgcagtcacacactgattcatgttcccatcctgaaactcagacgaaagataagaaacagatcaactgaatacctgtttttccaaggatgaaagatactcatgttcagaagctgaggtccagatcctgctttccctccatcttccccaacactcactgtttaattactgttgtcgatgcttgttaagaactgcctacatccacttttggaatctcagaataaaattcacatacaccgtgggcatacttcctgagactcatcgtggagatgctgtaaacctagcacatttcattatctaaatgtgacaacatgaaaataatattttttttgcatttgtaacattcaagaatgctcataaccttcggggaaataggtctttgttcctgagtattacaaatgcatggcataaattgtctgttccgatgtacagaaatagaactaagagtgtgtacatatagcatcttgaaaaatgatttcatattacttgttattctgcttctaaagcattatacaaaattgattgaagaggaaactggaatagaatatcatccagcacggatgaaggtttctgcttagttcttcatccccctcatgacatttgtaaagtgcagttattattgttatgtattattatttttatttcaataagtttttgggggaacaggtggtgtttggttacatgaataagttctttagtgctgatttctgagattttgatgaacccatcacccgagcagtgtacactgtatccaatatgtagtcttttatctgtcacccacctctcaccctttcccctgagtccccaaagtccatcttatcattattatgcttttgtgtcttcatagcttagcccccacttacaagtgagaacatacaacgtttagttttccattcctgagttacttcacttagaataatggtctccaattccatcccagttgctgcaaataaagtgctgtttttaagacacaaggctcagttcattttctggaaggcaccccaatagatatttgctcagctcttgctgcagaaactttttttttctttgaaagaatctcagtcactgtaaacatgaaatcttaaaaatactcaattttcggctgggctcggtggctcatgcctgtaatcccagcactttgggaggccgagaaaggtggatcatgaggtcaggagtttgagaacagcctggctaacatagtgaaatcccatctctactaaaaatacaaaaaattagccgggtgtggtggtgagcacctgtaatcccagctacttgagaggctgaggcaggagaattgcttgaacccgggaggcggaggttgcagcgagccgagatcacgcgactacacaccagccagggcgacagtgcgagactccgtctcaaaaaaaaaaaattaattttcttcacttatgatctactcaaaactagcactgatcataaatttcttaaaaatgtactatttaaaagttaaagttagattaaacttaaaagatttaaattaaaaggggttaaatgtaacatttttagtcaagtcaaaaatttaactttagagtctataagaacccaagaatatgataaaaatattatggaaagaaagcaatagagcatgctacctgtaggttgggctttaaagtctttttgaatatattaaagcttcaatataagtctatgaatatctttttgaaatcctgcagattcttacaggatagctttcacatctggatttctcttaatattgataaaggaagaagagttattttctatgtatgttttttaactcattatgatggaaggtaaatatttcagctaatacaaaattatctaatttttctttgttttctggttcttcttacctctaatcccaaacaatccatgcagatcattctggatagataataaacaattattttaaacaaatattcaatgaataaatctttaataagaatttctccattttaaataataataaaatatccttaatacatgcctaaacctctctgttatttattcatcaggtatccaggccactagggaaaacatattttaaaaatatgcctaacagctaggtgcagtggcacacacctgtagttccagccgctctggaggctgaggctggaggactgcttgagcctagtcgtgtgagaccagccagggctacatagcaagacccctatctctaaaaaataaataaatacatacaatgcctaacataaattttttaattgaaccaattggttaattaacaagttaactagtgaaaaggcagcaaccactagtaatggttacaaggaaaaaattaataaaaaggtaatggggtagtgcacggtggttcatgcctgtaatcccagcactttgggaggctgaggcaggcagatcacttgaggtcaggagttcaagaccagcctggccaacatggcaaaactccgcctctactaaaaataccaaaaattagccagctgtggtggcaggcgcctgtagtcccagctgctcaggaggctgaggcaggagaatggcttgaacctgggaggtgaaagttgcagtgagccaagatcatgccactgcattctagcctgggcaactcagtctcaaaagaaaaaaaaaagttaatgggtgtaagaaatacatagccagaataaataaaatggaagaatgttgaatcttaaggtcctaatgtactcaaatggttggaaagaccaaaataatgtcatctatatctgtatctatctatctatctatctatctatctatctatctatacacgcatatatgtgtatgtgtgtgtgaatatatatacacacatatatacacacatatatatacacatatatacacacacacatatatatatacacatatatatacacatatacgtatatatacacacatatatatacacatatacatatatatacacacacatatatatagagagagagttttttgagacggagtcttgctctgtcgcccgggctggagtgcagtggtgcagtatcagctcactacaacctccgtctcccgggttcaatcgattctcccgcctcagcctcctgggtagctgagattacaggcacctgctatcatgctccgctaatttttgtatttttgtagagacggggtttcagcatgttggccaggctggtcttgaactcctgacctcaggtgatcctctcgcctcggtctcccaaagtgctgggattacaagcgtgagccaccacgcctggccagtataaacaccgatccttgaagctgagcaactcttaccatctctcattaaccaccactacgccccctgctgttcactttgttaatctacgacattatatggccgagggcctatataatgcatgtccaggctattcagctgtcctttaaattcattccacactgtggaatggaattgttttctccagatggcctccatttcctcttcacaagcatccaacagtgttttgatttccctcaataaaaaaaaaattcttctcccttcccctttcattagactaagcatttctattaatatttcctcacattggtgttaacagttctctaatttcagagctttcttatctctggtcttaaaatattttcttttatctgccaggcgcggtggctcatgcctgtaatcccagcactttgggaggccaaggcaggcggatcacttgaggtcagcagtttgagaccagcctgaccaagatggtgaaaccctgtctctactaaaattacaaaaattaagctgtgtgtggtggtgcacgcctgcaatcccaggtactcaggagggtgaggctggagaatcgctggaacctgggaggcggaggttgcagtgagccgagatcgggtcactgcactccagcctgggcggcagagtgagactccatctcaaaaaaaaaaaaaaagaagaaaagattttcttttatcatttggtaggacacatgttcttacatcctaattttcttccatatcaaatactatatctttgttctcaagaaagaagccaatgtgtggaaatttaataccaataataatagccaaaacctcaatagctaatagctcttaagtacatatgcaccaggcactattttgtacccggcactctttttagtgcttttagtgtaattaattcacttaatcttctcaaccacgccatagggtaggtactattgtcatcaactttttgcaggtggggaaactgaggcatagaaagtgatttgcttagcttgacatgacagaactagcaatttgggagctgggagtccaacccaggcagtgtggcttcagagcttgtgctttgatcccctcacaactatggccaaactatatagctatagtgtagtcaaattacatctatggacaactgaagaagataatggaaaccagaatgggtgatggaagcaagtgccagcattgtgtcaatttatctgcttctacggagtacagtacaggaaaacaaaatcttccaagcatatgttcttggtatttgacactttactaaatctctaccaaagtcttcaaatggaaaagcggagctccaaattcacattcgcttgaatttttattgtatataatgcttcacggtatttatagcctaaatcacaatgaatagtatcccatcagctgaaacgtcttaagtcttaaccatcatctaactgttcagccgaatgaaaacaatgatgatcataattggagctgaaataacagagaagctcatttactctgagatatgaggcagggacaatttcccatgaaatgaacctaattttttcccttaatctgaaattgattactttgcttttttggtatattaatttggtgttcaaggtataaattataagaagatcaaatatgctttaaactgaaactcttatttttctttgttaatatctgaccatatctactaacttacatgaaatagttgcttgtaatttaatatgatatactgtcatctggatatttgctactttttccagcctaaactggtttcaataaagcacttgactttaaggaatactcatcgtatctaatcttctatttttttttccttttttgagatggaatctagttctgttccctgggctggagtgcagtggcacaataatggctcactgtaacctcctcctcccgggttcaagcaattctcctgcctcagcgtcccgagtagctgagactacaggcacgtgccaccacacatggctaatttttgtatttttagtatagatgggttttaccatgttgaccaggctggtcttgaactcctgacctcaagtgattctctgcctcaacctcccaaagtgctggggttacacgtgtgaggctccgtgcccgacctgactcttctatttacataaactttaaaaaagatgttatttgtaattgacacatagtaatagtacatgtttatgggaaacggtgtgatgtttcaatacatgtgtacattgtataatgatcaaatcagggtagttagcatgtcaagcacctcaaatctttatcatttctttatgatgataactttcaagatcctattttatagctatcttgaaatatatactatattaaccttaaagatacataggataggtattaaatactaaaatcccttcccaaatcatatgtgaatgggagaaaaaactagcaagcagccttagaataatttttttatgcaacatttgtaacaaatggtgttgtaacatttgttataataaatgggtttcaaacataacgtatgaaacattttatttagaaggacacttgaaaatctctatcagccaataaattccatattttagagttacctactgtccttcaaaaaaccatggctattggttatgtaaagacttgaatgtaaaataactaaacttctttgtagaacacaagatttatgtgtctgggctgtgagatgtactaatatgttggtaacatccaaatagcttaatcttattttaatcatatttttaaaacaagttttgctctgatacttaattttaaatataacagagaatagtcagtaatgatttgtttccttttaccttgatattacttctagatcaacgttatataaaatcaggccacttaaaattgtgacaatgattcttagtttgcaaactaaaacagtgtctttagcctaccaaatgaaaagccgaatcaacttgactcctccagtgttgatgaacagatcaacagtatctatagataaaggaataaatagagcaatgtaatttacattgaggctgccattttgcttacattttgtgagttttagtaattttattttacttatttattttattttatttttttttgagacagagtcttgctctgtcacccaggctggagtgcagtggtatggtctcggctcactgcaacctctgccacctgggttcaaacaattctcctgcctcagcctcccaagtagctgggattacaggcatataccaccatgcctggctaatttttgtatttttagtagagacggagtttcactatgttggccagactggtctcaaactcctgacctcatgatccacccacctcagcctcccaaagtgctgggattacaggcatgagccactgcatccagctgagttttagtaatttttaaggtcctagctaagtaagtagttagatgtcataagcaatgtatatttgctatttgatactttactatctctatcaaagtctttaaaacacaaaactgggacctaaaattagtagtaccatactttctttcttgattctataagaatcaaatatatattgtggactgacttcagtttccctagcttcaaactgggaggcactttggttggctacctcattaaaatggggtcagaatgaacgcaggcatgccttgttttattgtgctttgctttgttgcactttgaagatacagcattttttttacaaattaagttttgtggcaaccctgagtggagcaagtctattgccatcatttttccaacagcatatgctcactttgtgtccctacatcacagtttggtaattcttgcaatgtttcaagctttctattcttatatctgttacagtgatctatgatcagtgatttttgatgttatcattgtaattttggggggacatcttgaaccacccctgtataagacattgaacttaatcataaaagttatgtgtgttctgatggctccaccaacccactggccattccagtctcctctcccttttttctggcttcactattaactgagacatgacggtattcaaatttgatcagttaagaaccctatcatagcctctaagtgttcaagtgaaaggaagaattgcagatctgtcgttttaaatcaaaacctaggggctggacactgtggctcaggtgtgtaattccagcactttgggaggccaaggcgggtggatcacctgagatcaggagttcaagaccagcctggccaacatggcaaaaccctgtctctactaaaaatataaaaattagctgggcatggtggagcgtgcctgtaatcccggctactagggaggctgaggcaggagaatcacttgaaccagggaggcagaggttgcagtgagccaagatcgcaccattgcactccagcctgggcaacaagagtgaaactccatctcaaaaacaaagcaaaataaaataaaataataaataaataaaaacctagaaataattaaacctagtaaggaaggcatgttgaaagctgaagtaggccaaaagctaggcttcctgcaccaaacagttaccctagttgtaaatgcaaaggtaaagttctcaaaacatattaaaagtgctacctactccagttccagtgaacacacgaatgataaaaaaagtgagtggttcacgcctgtaatcccggcactttgaaaggctgaggtgggtagatcacttgaagccaggagttcgagaccagcctgaccgacatggtgaaaccctatctctactataaatgcaaaaaaaattagccaggtgtggtggtgcgtgcctgtagtctcagatacatgggaggctgaggcaggagaattgcttgaacctgggaggcagaggttgcagtgagccaagatcgtgccactgcactccagcctgggcaacagagtgagactccatcacaaaaaaaaaaaaaaaaaaaaaaagaagaagaagaggtgaaacagcctgattgctgatgtgaagatagcctctgagtgatctagatagaagatcaaaccagctatagcactcccttaaggcaaagcccaatccagagcaaggcactaactctcttggattctataaagctgagacaggtgaggaagctgaagaagaaaactctgaagctttaagaggttggtccataaggtttaaggaaagcagtcatctccataacacaaaactgcaagatgaaacagcaaaggctgatacagaagctgctgtaagttatccagaccatctagctaagaccattgatgaagatggctacaccaaacaacagattttttgtatagatgaaacagccttctcttggaagaagatgccatctaagactttcacggcaagaaaggtgaagtcaatgcctggcttcaaagcctcaaagaacaggctgacactcttgttaggggctaaagcagctggtgacttaggttgatgccagtgcttagtcaccattctgaaaatcctagggccttaaaaattttgctagggttgggtgcattggctcatgcctgtaattctaacactttgggaggctgaggttggtggtgagcccaggagtttgagaccagcctgggtaacatgttgaaaccctgcctctacaaaaaaaacaaaaacaaaaattagccaggcatgggggctggcatgcacccgtagtcccagctacttgggaggctgaggtaagaggatcacttgagcccaggacgttgaggctgcagtgagttgtgattacaccagagtgagactgtctcggggagagagagagagagagagagagagagagagaattatgctatatttactcggcttggactctgttaatggaaaaacaaagcctggatgacagacagcacatctgtttatggcatggattaccgaatattttaaacccactgttgagacctactgctcaaaaaaatactttttttcaaaatattactgctcattgacaatgcacctggtcacccaagagtgctgatggagatgtgcagagatgagtgttgtttgcatgcctaacacaacatgcattttgcagcccacggatcaaaaagtaattttgactttttagtcttattatttaaagaatacactttgtacggctacaggtgctatagacagtgattcttctgataaatctggacaaagtaagtacattgaaatccttccagaaaagcttcatcattctagatggcattatgaacattcatgactcatgggaggaggtgaaaacatcaacatgaacaggagtttggaagaagttgattccaaccctcatggatgactttgaggggttcaagacttcagtagaggaaataatttcaggtgtagtggaaatatggagaactagaatgagatgtgaactctgaagataggactgaattgctgcaatctcacgatcaaacttgaatggataaagagttgcttcctctggaggagcaaagaaagtgtcttcttgagatgcaaactattgttagtgaagatgctgtgaacattgttgaaatgacaacaaaggatttagaatattacatccacttagttaataaagcagcaacagggcttgagggcattgacttcaatttcgaaagaagtttcactttgggtaaaatgctgtcaaacagcatcgcatgctacagagaaatctttcatcaaaagaagcctattgagtcacacatttcattgttgtcttcttttaagaaattgccacagccacctcaaccttcagcaaccactactttgatcagtaagcagccatcaacgtcaaggcaagactgtccagcagcaaaaaagattatgacttgctaaagactcaggtgctcattagtatttttcagcaccaaagtattttttttgtgctgggcatggtgggtcactcctgtaatccaagccagtctggaggctgaaatgggaggattgcttgagcccaggagtttaaggctacagtgggctatgaccatgccactgcactccagcccaggtaatagagcgaaagcccatctctctaaaaaaaaaaaagggctgggcacggtggctcacgcctgtaatcctagcactttggtaggtccaagcgggtggatcatctgaggtcaggagttcgagaccagcctggccaacatggcgaaatcctgtctctactaaaaaatgcaaaaattagctgggcatggtggcacatgcatgtagtcccagctactcaggaggctaaggcaggagaatctcttgaacctgggaggcagaggttgcagtgagccaaggtcgcaccattgcactctagcctggttgacagagtgagactccgtctgaaggaaaaaaaaaaacggttttttttaaaaaaaagaaaaagtattttaaaattaatgtgtatacttttttatgagcacaattctattgtacacttaatagactatagtatagtgtcatcataacttctatgcgctgggaaaccaaaaaactcgtgtgactcactttattgcaatatttgctttactgcagtggtctgaaaccaaaccctcaatagctctgaggtatgcttgcattacgatgttcacaaatcctttaaaaatattttacacagcatattttaaataactactgttagaagcccctattgtacaaaagaatggattttttttttttttttcacggagtctcactctgtcgcccaggctggagtacagtggtgtgatctcggctcactgcaacctctgctgcccaggttcaagtgattctcttgcttcagcctcctgagtagctgggaatacaggcgcccacaaccacgcccagctattttttgtattttagtagagacagggtttcaccaccttggccaggctggtcttgaacttctgaccttgtgatccacccacctcggcctcccaaaatgctggaattacaggcatgagccaccgcgcctggccccaaaacaatgaatttttaaaagttaaaagccaggcattatttttttcttaaaggattatctaagtattaacaaaattcatccaaatgtctattggaaacctgtataatcctagatctcatacaaataagtttaagaaaattatgcacaaaatttcctacatttttctttgaaatttccacaagcatcccaaaatttattcatcgtgccagatggtgttaccatactccacacagtttctttatatatagtagcatccgatttggcaatatgcccccaaaaatgtttaataaattcattttgatatttatttgggtcaaaaaacaaaccagaaccaaaagaataaataaggacctataaagtggacatcttcagttatctttagcaaacgtgcagggtttctaggttctcttcattttccatctaaatgccagtaaggtaaggctgccagaaaggggttccaggacacacttccaaagaattctggtggccgtaaagtacaatctaatgtctctgccgttttacttcttgtactgtctgatacagaatcattaacaaatgtacagtatgtagctcatgctgctgtgctacgaggttagccatcatctttatggataacaggaagcccaatttataaaatgccattagtgttcattgtactctcaaatagctactttccaatactacacagccacataatactgattaaatactacccaatcgtgtgatatgttaattaaaaaacagttagaactaggctaggtgcagtggctcatgcctgtaatctcagcactttgggaggctgaggtgggcagattgcttgagcccaggagtttgagacctgcctgggcaacatgatgaaactccgactctacaaaatgtgtgtgtgtatatatatataaattagccaggtatggtaatgtgcatctgtagtcccagctacttgggaggctgaggtgggaggatcacctgagcccaggaggtcaaggctgcagtgagctatgattgcaccactgcactccagcctgggcgataaagtgaaaccccatctcaaacaaaacaaaaaaatgaaacaaaaatcccaacagataaaactgattggttttttgactttggtctacagatacaattattagtctaccaatctcaaaagagaataaatatttaaaaaccagtagtattttctacttatctgccatatgttgttaattataaaacattcactctagatgcaaatccagatgaaacagcttaagaacaagtttatttcttatattgaggatctgattatttctacacaattgtagttcagacaacttcattttctgtggacttttaaactttttctataacttgcatatgtcacttacctaaaaaatttcccagaatattttatagtttttaaaaaagtgcagtagtttagtatgacctgaattattcagttctgtgactgaagctgagaaccatctattaatatcaatgtgaacagaccaaggagccttgaagggtacaacactttgtcctatatcagtgtttctaactcatcctcaaatagtacagcatttattgaattgtcacagtgtattggccaaggtacagggtggtaaggagataaacagatttgctgtggactttgtaagtcctgaattgagcttgtcccattaacaactaatataaaatgagccagaatgttgctagatgactcttagcctgaaaaggacacatttccagggcacttaggaaaagttacctagcttaatactagattagatcgtttaaagttaggaagtaggaatcagaagacacatttttacatctgcggtcaagatggtttcaggtcacagatttttccatcttgcgaaagtaaagcaccctgaggtgatgatgacaaactgggctgttgggacaacccatttcacagcgtcattgtaaggataaaatgatatggtgtgtgtggaaagagaccgtaaactgtaaaatattacaaaaatgttattaacattactcatggtgtatagcagggtttctcagaattttaagcttctctgaccagaaatcatacttttacatttttgtaacctataccctatcattattgtaagtcttaagaaaaggcttaagacttaagacttaaaaaatgaaatataataaactgaggtgtttccctcttatttcttttggtccctgagattaaaaagcagatttgtgagatatgtcttttacagctggcatttcttaggctgaattctatattttgatttttcctagtccttctctaaatacatagaccgactacttaaatgtaccaggacttggacatcctgagagataggtaagaaaagtaaaataggtggaaattcagatatatactcaaggaaaactgagaaatccttttgtctgtttataaaattttatttatttattttattaacttttttttttttttttaaatagagacagggtctcgccatgttgcccaggctggtcttgaatccctgggctcaagcaatccttccacctcgatctcccaaagtgttgggatcacagacatgagctaccacacctggccaatccttttttcttatgttgcaagattcatgacttatgacgcatttgtcagtaactcgagtttatggaaacatgcagtcaagaccagtttgtaaagcagggatctacacatttatcctgtaaaggaccagacagtaaatattttagacttcaggggccggatgctctctgttgctaatattcaactctggggaaacacaaaaatagccatagacaatacttaaatggatgggcatagctgtgtttcaataaaactttacttatggcagggcgtggtggctcatgcctgtgatcccagcactttgggaggccaaggcgggtagatcagctgagatcaggagatcgaggccagcctggccaagatggtgaaaccctgtctctactaaaaatacaaaaattagctgggcatggtggtgggcacctgtagtcccagctacttggggggctgaggcaggagaatcgcttgaacctgggaggccgaggttgcagcaagctaagatcgtgccattgcactccagcctgggtgacagagcaagactaaaaaacaaacaaataaacaaacaaaaaaaactaaaaacaaaaacaaaaacaaaaaagcctttacttataataagagccagtgggctggatttggaccataggccacaatttgacaaccctcattctaaaggaattctctctgctctctccataacttaataaatgttcactacacacccctcatgtcactgggcatccatcgatcaccctgagccctctgtagcatattacctttgaaagctgaagcggtagccacagtgaggttcttcaattctttacgtttgaaaaagaaaatacagtataaacacgagattatgaagacatcctctcggggagaagtgataaagtgagaaactaggactctgggtgaccaatgtgcaattctttctcaatgaccccatacaagacaagccagtaattagttaaatatgaaattgattaggtgagttccaaaggagttccgaatctaagtgtaactgaaactttacacagagagcacagccatttatttggctttctgtagagctctggtgtcttcagattttctgaagccaggcagggcaggacaggcagaaaatgagtgagtgtggtaagaaagagaaaaatatacacagatgtgtgatatgtatatatatatatatccagatatatatatccatatatatatccagatatatatatccatatatatatccagatatatccatatatatatccatatatatccatatatatatccatatatatatccatatatatatccatatatatatccatatatatatagatatatatatagttggctctccatatacaaggattcaaccaactgtggatcaaaaatactcagaaagaatttccacctggactgaacatgtacagacttttttttcttgtcagtattctctaagcaatatagtctaacaactattaacatagcatttacattgtattaggtactatacataatctagagatgatttaatgtatatgggaatatgtgtgtaggttacatgcaaatactatgtcattttgcatcagagatcaatggattttggtatttgagggaggccatggaaccaaacccgtggataccaagggacaactgtatcaggaaagagaaattgattgattagggtagaagagaaaaatatatgctgtttgtgagattagacaccattccaattttctctcttaacagaacttgaaattttttgtgtgccctgtattactcaatctaatgattcagcatagttcactacttgccagtgctttaatacacagatgatatgctgacacttttaaagggtgaatgctaggctggaataatgtctattcttactttcccagaacctacatcttgttgtcaattggctcatgctaacatgcctgtccaagatgcaatgtggtttggaggaaaagtatgtaacagcatcacactggggctctaaatggctatttaattactaagaaatgttgaacattcagtttatacattttttaattcaatgagaatgtcatccaataaggactctagatagttcgttggcatttccataagatatattaggcactgttaattataaagatttgttgacagtaatttgaaaatctagaatcttaatacgagtttcaggaaagtattagccaaaatgtttttaatgagataattaaataaaaattcttaggccgggtgtggtggctcacgcatgtaatccagcactttgggaggccgaggcgggtggatcatgaggtcaagagatctggaccatcctggtcaatatggtgaaacactgtatctactaaaaatacaaaaaaattagctgggtgtgatggcacgcacatgtagtcccagctactcgggaggctgaggcaggagaatcgcttgaacccaggaggcagaggttgcagtgagctgagatcacactactgcactccagcctggcgacagagcaagactccatctcaaaaaaaaaaaaaaaagaaattcttcttcttagcaaatctttatgctggtgtttctttaacttttaacaaagaaggctaagataagctaacagataatcaacctattttagatgaattcattcagtagataataaatccatgcaaacatcagataaacaaatattggttgagcacatattatatgcatgacaaatgccagacctggggctacatgatgttgatgaaactgtccctgcttaagcttagagtcaagggccaaatacagacaagcaaggtcttcccaaaggagtaggttaggaaggtgcagggaacacaccattttgtagaaaaggtaaaatttgtagttaagtaatgttactgagagataatatcagatatatggcgcataagagctaatagatgccaccagaatttaaaagggtggatactctttaatgggacagagggatgtgatcaaggacatcttcatggaagagatgagctagaacctcaaatgaagaacagagtttagaaaacagagatggcagtggaggccagaaaaaggcaaagtcatagaacaaagtcattggacagtatgcactaaggtatagaagtggtgccatgtcaattcatggctcattgggataagtaatcctgtttggactggattgcttaaacaaaggaatcctatggtggatgaatgagacataaggctaaacagctatagccagccatattgtaagttgaatcacactgagatttctagaatttctgctggtaatcatagttcattgtgacactttagtgcagtaaaaaaaaaacaaaactgtacttaaaaatattttaccatcacaacttgccatccagtcccttaaatgaatcctccacctgcttctcccccatatacttcactatatataacacacctgtatatgcaatgattttctagggtctggaaaagtagatatttagacttgagttcttagcttgaactttggtagcttcctttctcttgtttctgacatctagtagacactgttggaaaacattcataaatgtcacgtgcagatttgtattactactttgaaggcagtatttcaaatggtaatataagtatttcttgtctcatctttttttttttttttttttgagacggagtctctctctgtcacccaggctggagtgcagtggcccaatcttggctcactgcaagctctgcctcccgggttcatgccattctcctgcctcagcctcctgagtagctgggactacaggagcccaccaccatgcctggctaatttttctgtattttcagtagagacagagtttcaccgtgttagtcagtatggtcttgatcttctgacctcatgatctgccggcctcggcctcccgaagtgctgggattacaggcgtgagccaccacgcctggcctgtctcatctcttaagagacgttgttatgagagtcatcagtggcttgccaaagcaagggatcaggaagatgtttagccagtgtataaaatagaatgtgtgatcacaattcccttctctctttaaatcattgtggttttaatcaaacaggtgagttgggtttagagacatggaatattaaaactggaagaggccttagtctgagtctccttattttatagtggaactaaaagaggcccagaaaggtaaaatgacttgccttaggagacacagctaactttttctacagccggaattagaatccagatctcttagattctagtgtttttcctatgtcaaaatatcccattactaaatctcattagctttaaattaacttaaaagtagagcatttaggccagaccaggtggttcatgcctgtaatcccagcactttgggaggctgaggcgggcggatcacctgaggtcagaagttcgagactagcctggccagcatgtgaaaccccgtctgtactaaaaatacaaaataagctgggcatggtggtgcacacctataatcccaactattcgggaggctgaggcagcagaattacttgaacttgggatgcggaggttgcagtgagctgagactgcaccactgcactccagcctgggcaaaaagagtgaagctccatctcaaaaaagaaaaaagaagagcatctagtaactttccatggtatgtagcagggtttctcaaactcacactattgacatctggaccagataattctttgttgtggggctttctgtatgctatagtatgattaccagtatccctgtataccaatatacccattagatcccagtatcacactctctccccctattgtgataacccaaaatatttccagacttgccaaacatctcttgggaggcaagattacccccagttgagaaacactgatattcagctattaagtcacaagtactgttcctggcctgtggaatatatgtgacacctccccgacctcctcctccctgcatatgcctctagaataattccttcagatgccagtctgacctaacctaaaggcctccctccaaggatctcacacctcgaacctgacagcacaaggctctttccaggcgaggtgctcaggtttccctgccagtggtaactaccttgttggaatccagggtgatgtgttacagagggtggctgagaaagtccaaaggacgtgcccgctgagtcttcaaggacaagtcagaaggaactaggaagaaaatggaaaagtcttgctagacagagagcatgtaccaggctgagggcggcggctcacgcctgcaatcccagcactttgcgaggctgaggggggtggatcacttgaggtcaggagttaaagaccagcctggccaacatggtgaaaccctttctctactaaaaatacaaaaattagctggatgtggtggtgcacacctgtaatcccagctactcaggaggttgaggcaggagaattgcttgaacctgggaggtggaggttgcagtgagcaaagatcatgccattgcaacagagcaagactgtctcaaaaaaaaaaaaaaaaaaaaagagagagagagcgagcatgagagcatgtacctaatggcaaggagtgagaaaagctgccttctcctgactctaatgtcaacatacgatgagaaatgaagctggagataaagcagggcccaggtcttgaggaaccaattataccatgccatggagtttggaatagatcctgagtatatttagaaactgagaggagagtgcatctgacttgcattttagaaagatctgaagtacagaaaattacaaagattggtgcctgtaatcccagcacttttggaggctgaggcagaaggattgcttgaagccaggactttgagaccagcctgggcaacgcagcaactctgtctctacaataaaaaataacaaaaattagctgggcatggtagctcacgcttgcagtcccagctacttgggagactgaggtgggaggatctcttgagcccaggagtttgaggctacagtgacctatatgatcaggccactgcactccagcttggaagacaaagcaagacccttgtccctaaaaacaaacaaacaaacatagctgggcttggtggcatgcacctataatccctgctactctggaggttgaggtgggagaatctgggaggtggaggctgcagtgagctgagatcatgacactgcactccaggctgggcgacagagtgagactctgtctcaaaaaattaaaaaaaaaaataaaaacaaacaaacaattaaaaagatgggggaggccaggcgcggtggttcacgtctgtaatcccaacactttgcaaagccaaggtgggtggatcacttggggtcaggagtttgagaccccctgaccaacacggtgaaacactgtctctattacaaatgcaaaaattagctgggtgttgtggtgagctcctgtaacatcagccattcgggaggctaaggcaggagaatcgcttgaacctgaggggtggaggttgcagggagccgagattgcgccactgcactacagcctgggtgacagagcgaggactcatctcaaaaaaaaaaaaaaaaaaaaaaaaaaaaaagatgggggatttaaaacagaagcatgggccacctgaagatgaacacttgatgtgcatataaaaggagacacctgccagaattcactcctgccttcttacgccacaatggggaggattctcctcctagtaccaatgataccacgaagactggcaggaagaagagcacaggtacctcctcttccaccacccacgtatgtgggagaggaaacttttgaacaccaaggcaggaagaagaactttttcttctgggaaccaagacttcacagagaggttgagttccctgtcatcccaatttcctacttgaaattcaggatacatttttcccagaaagaaatatgatacaaaattttgctatttttaaacggatgattcagccaatttatggatgagaggtgttttgtgtatgcatgtgtgcttgtgtgtgtatattagctgctgaacatattgttggtgctatgggaaaatgaattgcagattgactttcaagctacaatccatttgccagctgtggactccgcacgcctatgcagagaaagtaagagcagtaatgacagtggcaaaatgcaccagacaagttgtgattagaactcttccataaagaagggagtctggggctacttaagagcaatgcagctgaccacataaaatgcaaattgaagcaagctctaggtggctgttcaggccctgcctgggctaagccagtttacagaaagctccagcagctatcccagggcctggctccatcagtgtttgggaaagtgaactagattttcacacgtgtctcctggttaaatgagacttaggaaaccatgctggtttgagggggtgctgagcttgtgtgtatacgataggagggaagggacaacatggattagcctagaaggacaataaaagagttagaaagtccttgcacctgtgttcacagaccagcaatgccttcctcttaggggcagaagctaatatggagattagattgccttcactaattgtcaagaatgtcagtaaaggggaccaacttaagtaaattaatgttagtctcacaacctattgcatatttaagatttgatttgctggtttgcagctgaaataagacggcttccttccctctaatgcatcccttatgcagatggtcctggcttccagcatcctaaatacaattccaatagttttcattagtaatcatcaaatctagctgaatcttctttcaaagtgcctctttttgcctttcactactgacctaacctatctctagcctctcccagttccaacccaccttgattgctgagggcaaatttactttcttaaaacaatgcttggattaagttacgcccctttgcaagaccctttcacctccccgcaagtacctgcagaataaagtccaaacctctagcccaccttttaaggccctgtggagtcctcacctgtaaatctcccccgccctcaccactcctgcacacaaggcaacaaggtctccttggcagcttctgagtaaggttgtccttatttctgccacagtgctttgtccacacctccttgaattcctcaattcctccctctgtcttaaaagaacatttctgagtctgtctgctccatgaagtataagtccgagctcatttttgcccatgccctgctcactcctctccattccttgcagtgaattgtgctaagcatctctggcttccttgtgaaaaaggtgatgccgttctccatcagggtgctgtgtacccactatgtgtgagcggtacagaatgaatgaacatcccagggccctagaaaggcgcctggcacatcctggacactcaacaagtatcttttaattttaatgaataaattcaagatattcgactgtattcattttccacccactttccccctaggccagggactctcctcccaggtgagaaaaaatcatctagataccttaattttgataaagttagcgttgatgtataaaaagcagaacttcctctgtaaccctgtgagaaatgagaagcctccaatcttcttccccacacctaccccctactgagtttcgggttccttggaaataactgacctggattgtttctgacaaaataaaactttgcatcttctccacagagcaaaggtaaccttacctccagccaacccaatcatccatacatttttcttactagaaaaaatgtttttaaaaatggaggtgtggccgggcgcggtggctcacgcctgtaatcccagcactttgggaggccgaggtgggcggatcataaggtcaggagttcgagaccagcctggctaaatgttgacaccccgtctctactaaaaattagccgggcgtggtggcgcatacctgtaatcccagctacttgggaggctaaggcaggagaattgcttgaacccgggaggcggaggttgcagtgagcagagatcgcgccactgcactccagcctgggcgacagagcgagactccctctcgggaaaaaaacaacaacaacaacaacaaaaaaacccccaaacaaacaaaaaacggaggtgtgagggtaaaacgtctacaggcaagaacagcacaacaggtgctgagctgcaaaatcaacacactaaactcccaaacagaccttctcgacaagccaaaagctctttagctaacctaatattctttagctgttgtttcagaggcttttcgagaacaaaactgccgccccgtcttggccttgccgcttttcacccatcactctactgagtgtgtgtctgacttgtttatctggacgcaatctttgtcgcacccagttatctcgctcagcgaccggggcgaccacgtttccttaaatcagagccccgtggactccgccggagaactacattacccagcggccttcgcgcccttcgcaggaaggacgtctgcgcactaagatactcagttccaagtttggagcttttagctgccagccctggcccatcatgtagctgcagcacagccttccctaacgttgcaactgggggaaaaatcactttccagtctgttttgcaaggtgtgcatttccatcttgattccctgaaagtccatctgctgcatcggtcaagagaaactccacttgcatgaagattgcacgcctgcagcttgcatctttgttgcaaaactagctacagaagagaagcaaggcaaagtcttttgtgctcccctcccccatcaaaggaaaggggaaaatgtctcagtcgaaaggtaagaggctgtttgcattagttgcaaaaatgcaaagggttgtgcatgcatttatgaatgcatggatgcaattttcgcctggcgagtgcatttttaagtttgaggttttccacagctcagttgcatttcctgtttagtatgtgtctttttttgcagacacagagagttcctgtaaggcagggcttgcagttcagctgtgcattgacgttatttgcattcttctgctaggattactgagctctttttgccttttgcacagtcaggagagacagagcaggttggtagcgtctaaatgtgcaaggctttatataattgtaaaattctttactatgcacagatattgtaagtaattttgtatgcaacaggaatagaaacttttaaaaactctataggtgaagatgaaaggtaaaacttgagttaaactactaggaaattaatgtaatcttatattctttgggggaaatagaccgttgcggtgccagtatttagctaaatttccattgatatcgccttgaacattaggtaacttttgatttttaaaggaagtaaaggtgaagggtgaataacagcatatcacaaaaaagcagacgagtcttgctcttctgagattttgcactttacaccaattgcttattggctcgcaaaatttagaagcagcagtgaagacctaatgttttatgtctgcccatttgggggatgctttgcatcttgggggaaaatattgggggtaaaactgtacttttaagcattacagtagtgtgaagggactgcactgtttcattgacaagcataatgaaatattttaagtgtgtaactgcgtgtatttagtcagctgtaataggttggaagttcacgttatggttgttttctttatgttcttttattttcttttcttaatttttgtttttaaacacagttgtattttgcaggcttaatgtcaccctgggaaggggatttaaaaaattcctgatatgacatcaaagagcagactaggtgctgtcaggtgcccctgggaccccaagtcacttgtttcagaacaattgtttctttaccatagagaaagcatatgccatatgagaagtatgggatgatgaagagaggtgttagatactattgaattaggctacccggggcactctttgagtaagacatggtgaaattaaagggtctaacaagctttttgctacttttttgggagggagtgtggggagttgttgcaccgctttttaattctacctgatgggagtcatatatctcagcagcccaagaaggaagtagtaatctcaagcattcaaagtagcactctgcttttctttgagtattaggggagaatggaaatctgaaaagttaagagtgctgaagaacctaggaattgacatatcaggtggagatgttcctcaagtggggaaaacctaaaaatctccttattgagtagagaaataatagttcagaagaggcagtccatgctttgatgtattaaagagatggcatttagttactttgtatttggtaaacattcgctcattcattcaattcagtttaatatatgtgtaatatattgtgatatgcatgtatatacatatgtatgtgtgtatatatatgcatgtatatgtatgtattgtgtgtgtatgtgtgcacatgatttagggacacacaaaaatatttaaaatgaagtttttccttcgggttggtgaaaacaagaatgtaaggaaatcattataatacaagataataggacaggtattgaagagaaatggtgctattggagtttaaaaatggaagtgatttatctatttgggggatagtcaggaaggtttatgaagagggtggtgtttactgtgatcttatctttggactttagggtctaaactaaatcaggctcctttttgcatatttttgggctcactatgaacgtggctccctcttagtagagccagtttttgagttgagaagccaaaggagatattagcactgcactcttccctatggatgtgtttacaatggatcaggtactggtggtccttcaaatcaattcccatttacccagatgagttttcttaattggattctgcttggaaagtacatctggaatgaacatggggttcttgtccgaaaggaaaattattggtagaaagaagtgggtgatcattttagaaatggcaaaagagccagccgccttggcctggactttaaatgtggaattggccttattcagctacgctattctcaaatggccaaaatactttttgcagtaccaaacttcttttttaatattctaacccaagaaatgggaggaaaagtgaaaagtggatacaatctcatagtattgaagaatttaacaatatgttcaattcaaggacctttacgaactttctagatcactataattcggtttaacagacctctaatttaaggcacagcagaggcaaaggaattacagactctctggaagctggaaggactgggttactgctctacagccttaccaacagtgagattccgagaaagaatttcttaaaaagaaattttgttttccacagttgtaactttaggtggtatgcttttcagcttgtttatattagctgtctggggttgagttgacatttttcaaatattaaagcagtagaatgccttttgaggaaatctgaaatgtaagttaacaggaagggcacccagaaagtgcaggaattcctgcacactacaggaagacaagctacaggaaaaatgtgtcatctacactacccgggagagaaaaactattgttatcagccataatgatctccggagggagggagagaaagagggaggtagggagatctggcatcccccagttcacctgaaaatacacaaaaagtttgaccctgttaaaatacacttttctcacttctcctcctattcacctttaaaaaatattagtttattttagttttagagagcaataagtaaatcatgtaagaaatgcctatgaggcacaattcagaagcatatagcagagtggtaggaaaggtcttaactctactggggttctttgcttctgtaattcattccacccttgggaaatgaaatgtgtaaatttcttgttctctataaattcctttgttaggttgtaccagacggacttgtcatgcttagcctgtaatctgagccagtatgttttataaccccgtacatctcaggacacaaaatcagaataggtagcttgggtttcctgagcttgctttgtattagcattgcattcagttctttagagcatgcggcctgttaactgtagggggcttcaggggtctctggttggtaaatttaatgttggagaaaagagttgagattctcttgtctttgtttttcagattagtgttactttaatgactccccagtattttaaaatctgaaagatctacaaggaatatttttaaaacttaaaagaaatttcataaataacccttgttcattatagaaacatttcatagaaaaggaaaaataagaatgactagttactgcagtctacactttggcatttattctcttggactttttttttctatctatgtgtatgaagcatccaaaatgtgtgtaaaactaagtctatttcgttccctcttgtttcacttaccaatatatggcaaaatattcccaagtttatatatttctacattcatagtatcctcttccattgtatttatttaaatagaatcttaatgtttattaactttcactattgtgaatatttccgtgatgatcataccagttcctacattatcatgcatactatgcccttagattaaattccagggagcaaaaccacaggctttgaatgtccagttcttcttcactctccattctcttttcttccttctgaaaatagctttttattattgcaaaaaaaaaatgacatatgctaatcaaaaaattcaaaccaaagataaattcacaataagaatataaaactcactcaaagtcataccacccagagctaattactgttagttttttgggtactatctccatatttgtatgtacatgttattttacacactatatattgtattttgtaacttgcttttttatactctaccatatatcttggatatctttctgtagtagtacacataaggttacctattttttaacaaccgtgaattttaatttgtaagaatgtagccatttacttaatgtcatattgagttttcaaacagtttccatttttttgcacagctatacacagtactgtaaggaatacctggaacatacatctttatacatttgcccaattatttctttaggatgattcctagaggtggaagtcctgggtcaaagggcatgtatagatatattgctaaattgcccttcatagaggtaacactaattctcatttctaccaataatatttagacgtgcccattctgtcctttcaagcataatggtacatattgccaagtaaattgctcttcaggaagatggtacctttcttcatcctgggtataacaatttgaaaaaatctttggcagtttgatgaaagctattaatattctactctaatattattagtgataaggcagttgcatttttcagtttttttgacatttgtgtttcatgtgcccaaatttctttttttctcatgaaatatatccttaaaattttaatttgggtggccaggcatggtggctcatgcctgtaaccccactttgggaggccgaggcaagtggatcacctgaggtcaggagttcaagaccagcctggccaacatagtgaaaccctgcctccactaaaaatacaaaaattagtcaggcgtggtggtgcacacctgtaatcccagcttcttgggagaatcgcttgaacctgggaggtggaggttgcaatgagcagagattgtgccactgcactgtagcctgggtgacagagccagacttcatctcaaaaaaaaaaaaaaattaattaatttggggatcaaattattttcaaagttagccagaaaatagcaatattgtagaggttaggtaatcctggattgatagttgggttctgtgtatctaaacaatttaattccttgatgagttctaattttaattttaacctaatgtcttaagctgctatcacatattttataaactcattttatttatatagtctatagctatccagacctatatgaaaataataagaaaaatgtagtgatctgattaaattccagtctgagaaatagcttacttttgggcattcctgcattttcagttatcttttcaggcaaaattagtttttctttaggtttataaataattcttacatagcacctggttgtgttatatgcattgttgcagagaaatttaatctaattttttttagcttcctgtgcaatgcctaatcacaaaaggtggttgacttaaatttcctacatttgttaaaataattaagtctagaatctttaagattcttgttaagaatcaattttaatgacctcacaagtcatataagtcaatcagatttaacatatccttaacatagccttaataaatgcgcctatttatgcatcctgatattaagtgatagaatttagagctatgaaagttttatagtccaatcacttcattttacacataagctaactgaggccttggaagtgagtgactttcctgaagacagtagagtggagtcacagggagaagtcagatctacagattctctgtccgtaagttcttttcactaaaccacacgtgaacactaataatccacatttataaaatttttttttcttcagaatctttagtatatttcacatttttagctttgcttgtttttgttgggagcagtctggcaagggggagctgatggtataatgagcaggggttatttttctgtgtccaagaaatggtgacatgtgaatcatggtggtggggtttcttaccagttctctgccaaaggatattttgcaaatgctctcattttgattcccagtgcctacatagtacagctgcaagttttaaccactgtaatggttgtttgccttttatggactgtcttgtttgaaagcccttgctgggtaactaaaccttttcttatatatctttacatctctgactcttatagcattgtccttataaataataggtgctcaaaaaatgtctgacaatgaaagtatttttcatcagtagggataagctctcatttgctcctaagttttatgaaagatttcgggtaattaaattacaatgcaattttcttcttgtgcttcttctttgtttgcactgatattcccattatgtatttgcttaattatttggaagttgcaagaacagcatgaaaagcaacttataatggctggcgaagtgtcatttctcctacctaagccttctgaacagatttaaaggttgcacaattctctgctaactttctttttaaaaaatatgagaagatgaattgtccgaagaatcccatccaatagaattgaagtgatttctgcatcctgtgctggttttaggagctggtttttaagtctatgaggcttctgaaggattgtcagagacaatcctttttttgttgttgttttttgttttttttttttgagacagagtctcgctctgtcacccaggctggagtgcagtggtgcgatctcagcttactgcaacctccgcctcctgggttcacgccattctcctgcctcagcctccggagtagctgggattacaggtgcctgccgccaccatgcccggctaattttttttgtatttttagtagagatgggatttcaccgtgttagccaggatggtctcgatctcctgacctcgtgatccacccgcctcggcctcccaaagtgctgggattacaggtgtgagccaccacgcccggcccagagacagtgtttttaacagctggctgccctctaacaaaacagggaacttcgcaaggatcacctcccagtgaaatgattcttcacttcctccttgaccacctccactgcctctgcccagccccttcctccctggcttgtaccccactctgtctcctttgatggtcttcctgagttggcccatgcggttcagtatgtagtccataatctccctctttctgagttgaggaggatattcaggttataatccccatacaatgaagtctatcagaaatcatcgtaatttttttttttttttttttttttttgagatggggtcttgctctgtcacccagactggagtgcagtggtgcaacctcagctcactgaaacctctgattcccagtttcaagcaattctcctgcctcagcctcccgagtagctgggattacaggtgcctgccaccataccaggctaatttttgtatttttagtagagacagggattcatcatgttggccaggctggtctcaaactcctgacctcaggtgatccacccacctcggcctcccgaagcactgggattacaggtatgagccaccacgcctggccaaatcatcgtaatttagtcaactccagtctgagttgaagcattaaataagcatttgcagcatccctgtcatctgttttactttctggtctgtacatcccttcttaagtcagattcttgagattagtcttctttggacagaccattagccccaggtggagctgctgatcacaacccctccctgtaccactcccaaggctgttgtcatcatcacttaccctaagccagttacttttcatatagtatgctttaggatgtcccataaacactatggacaaagttggtgttattatccttaatttacgagtgaggaaatcaattgttgttaaccaatttgcccatggctggatagcgagtcagtggcagaggcaggatggatgtctgactggtgggcctgtgcagcaaactgcagctcctgggccaaatctagcttcagctgttgtttttgtttgtttgtttgtttgtttgtttgagatggagttgcgctcttgttgcccaactgggagtgcaatggcgcgatcttggctcactgcaatcgccacctcctgggttcaagcgatcctcctgcctcagcctcccgagtagctgggattacaggtgtgcaccaccacgcccagctaattttttgtatttttagtagagacggggtttcaccatgttggccaggatgatctcgatctcttgaccttgtgatccgtcctcctcggcctcccaaagtgctgggattacaggcgtgagccatcgtgcccggccaagcctcagctgtttttaagtatagcccgtgagcgaagatggttttcccatttttaaatgattgaaaaaaaatcaaaatcaatgtttcatgacacatgaaaatgatacgaaattcaaattcagcatcgacaaacaaagttttattggaacacagctatggtcattcatttatatgttttccatggctgctctttgctcgacagctgtcgagttgagtagttgcgccagagcccctatgtcccacaaagccaaaaatatttgctatctggtcccttgcagaaaatgtttgttgaccctttcctttatgactttattccatcgaatactggggtctcttcatgacagagctcccagaaacattcctctctggctttaattggaagttgttaacctggataactactgctctgctgctcagccagagacctcttgggcccagcccacaggaaacgtctgagtggtgtctctcctagttataagaattgtaggtcattgctcatttcctctgaactaagttacccgtctccttttgcccgtcctggggtcttttccccttagttgtgttcttcctgtttgctttatatttctttcctttttttcttcccttcgatgagaagctgcttattaattcttccctgagactcttcatcctccccttattgatcccacatttctttagaaagtattaggttggtgcaaaagtaatattgttttttatcatcacttttcatggcaaaaaccacaattacttttgcaccgacgtaagaaatcaaaaataactctcctgctaccaccattgcctggcttgttggttatcatcatgacccagctcagaggttccatcatttcttttgtgtcaacgtgaaagcctccctgcatgggaccagagaggtttccagttatcatctcctgcaaagtttagagctgttttcttacattaaccccctaaccccgggtgggcaattttcttttgaggacgaatattctttgtgctcacagagtcgcttacatcgtggatattgggtatatttaggagagaaggttttgatagagggtctgaaaatgaagggaggtgaaagctacatgtagacagaggagctttggtagaatgagcccagatttgttcaccacatccagaatgatgtaaatttaagtcacgtacaaagaagtgctaatttctaccatcccagatggtatcactgctgtgattctttctgtgctccagatactgtgcttagtgatgaatgtgaattctatcatttactctcactatggatcagtgaggtgatatcccattttgtagatcagcaaactgaggccggagaggttaagaacttgcctcagttaccaaaccgatagtggcagagcagaggttttagccaaggtctgtctgacctcagaatctgagctcctggcgactccacttgagacgtcactccaaaataaaggtatgaaatccattacaccaaagacatggtcgaagaatgaaaaacgagtgtattctgtaggaatttggatagatttgggcataccagggccaagtatggtaattaagaagggctgacctgtgtctagctatttataggttctttttgacatgtccctttatatgtcttttgatcacagagtacagagtctgactcattttgactcttaaggttgagttccaaatagaaactgcccattggttgaaggaggctgattacaattggcccactgatagttactggtctggatatacaggaatgttatgttaaaatgtaggtaacaaatattgcttccatttgctgttctgtaggttgtatcacacagaaactaagccgactcaaaccttgtgtgtttccttacacatctaagttaaattgtattaaaactaacaagaacgtggccagtgtggcagcatacctaagtgtggggattttgcagcccctttttggcttagtgactttttttcttcctggttgtttctatgtaaatgtaacaatttccttgaaatgatgaatgaacccacatctccagtgttttcctcttgtactggacagagtggaggaaactggaattgcctgtttttgtggcagaggaggtagatggggatggaaatgaatttccttttaaagcaatgaattctttttttttttgtttttttctgagatggcgtatagctctgtcacccaggctggagtacagtggtgctatctcagctcactgcaacctccgcctcccgggttcaagtgattctcctgcctcagcctcccaagtagctgggattacaggcgcccaccaccacacccagctactttttgtatttttagtagagatggggcttcactgtgttggccaggctggtgttgaactcctgacctcatgattcgcccgcctcggcctcccaaagttctgggcttacaagcatgagccaccgcacccggcctaaaccaatgaattctttctcggctttctctccagccaaagcagaacagctatacctatgcctcagttgtttttcatgatcccatgtcgaagctgcggaaatagatggtctggttgttgagtgacaagttatttattcccttcctttattctccctcctccaatttcaaatgggatgagaggagatagctgtaagcgtagggctagaatctgaagaatcagtgggaacagaatagttcagagtatggaaattagtttgaagtaaatgtagagataacctttttgtgatatttgtaaaccttgcgaggcagtcttcacagtttatttaccccttcctgtacccgaaacacctttgccatttgaaaaaaaaaaatcacaaactctgcatatacctaaaaagaggacttggataaggagtttgtttagatcaattcaacaaaggtttttgtttgtttgtttgcttttttcattcagggtcttctatgtggcccagtctggcctcaactcttgggctcaaacatcctcctgtgtagctgggattacagccagtgccactgttcccggctcaaataatacatttttgatctattgttatgtttaagacatcatgctgggtagaaataggcagaaatgcatttgactttactcttccagtgattagccatgtggccttggaaaatctacttaacctctagcttcggtttcttcaccttctaaataaaaagactgacactcattcacgaggtctttatgaagattaagcaaggtcatatatgtaacatgctttggccagtgcttggcattcatttattcaacaaatatttatgagtgcactttatatttgaggtactttgctatagtactctctctataaacatacatttgcttcactcttcctttccttccagcccttaaggaggttattgtctaggaggaggtaagaaaagcataaaaatgtgtagaatctaaactggaatcctagattagcttaaaagaggtactattgagtgggaaagtcctatgaataagagagagatcaggaaagtgttgacaggtgtggaggtatcaatgtgatttttagaatcaatgaggaaattagatccaacataggtacgggaaggactcttgacttctagtatccagtggcacaatagaacaataaaatagagcaattctttagaaggatttaaaaaaaaaaaaagaaaagaaaatgccccagcaaagtatctgaagcttaagagaccttacttgtgttttctaagaacttcctttttcttaccaagattaatactgtagctattgcttgtgattgcaataggtgaataaatggaatatatcatatctcatacttttaggtgttttttggattgtggaaactccaggaaatctagaggttaatagttaaacaagtatatcatatcaaccaggtttatagacacactgtaattatataagcaagctgttggttcaataatcaacgtctagctgggtcagggaatattttccagagcttggccacggctgtaattttcattttttataacctgctaacatgccaacctgccttttccatttctttttgtttttctcgaatcatctgaaatcagtgtaagagaaggaaacctgttcaatgtacttttgaattctcattttatttacctcaagtaaaatagtgttctggaaagttcttcgtattaccaaattgactttctcaagcatgatactggatattagcaagggagttcataatttattttctatttttaatttcagaaaaatacagttctaagagataaaaagataaacatataaaaataaaaaggaagataaaaatacaggataaaagataaaatatttaatacaattaatagattaaatacattttttcttttattattttggtttcaaaaacagagtgacgtatagctctggggctcacagtgggctgtttctctgtgaacctagcatttaatcaccttctttccctcaataactccatttaaacagagtcagtacagtgtgaaggaggtgaattgagtcacccctcctcagattcatgtaagccacagggcagttttggcctcactttgctgtgtggttaaagataacatatgacccagccaggtagaagacctgtcagccatatcatctcattcaagtggcctgcaaagtcttcttgcttgggactttgttcctgaatgagcctctatttttgtaaggaaagtagaggaaaacaatgcagatttaattctgaaattggtttaagaatgggattgagaaattttgatatattcagtctggaataattgttttccatcccgagtttcattctttctttttgatgtaaccctatctaaggacaggatagctagtcagtgttgagcaagacatggcaggtagaggactagctgtctctggattgcatttaacaagcattatagaacaaccaaataaattatctgtacctcactctgtgctagactgatacaaaaatgaacagaatcctcttactaccctcaagaagctcatattctagtgggatgtctatgtttgctagagctactgtaacaaagtaccacaaattgggtggcttaaaccacggaaattaattgtctcgcagttctggaggccagaggtccaagatcaagttggcggcagggctggctccttctgaaggccataaggaaaaatctgttttgtgcttcttccctggcttctggtgtttgctggcaatctctgcatttcttcccctgtatactcatagcccagactttgccttcatgttcacatggcattctgcctgtctgtgtctgtatccaaatttcccctttttataaggaagccagtcatattaaagttagggcccgccctactccagtatgacatcatctgtcatcaagtaagatcccattcagagatgctgagggttagctgagggttaggacttcagtatattaattttaggaggacatagttcaacccataacatggcaggcaaacatggtcagcaaactaatgatactctgtgtgaaatgcacgtaagttctggtataagatacgagtaggataccaaagaaggtgggtgcataactcagcctgggaagatcaggagtctgttggtagaggaaggaccttaagttggtatagcagaacttgcagtgtggttctcaggagaataaggaagtaaaacaagagacttcccatctggtccttgaacggacagactacctgccctttcttctgtttttgtttttgttttttttttttttaattgttaatgacagactggatggttctaaactggggtgtgttaaattagagaacacacacacacacacacacacacacacgttgttgtattgattcccaaaactgaatttgtgtttagtggtaatgagacctacacaacactccctgtggttgtcacaggcagctttgatgtacagatacagggacaggacttggtggttgggagaaaggatcatccttcccattgtaacaaatggtcctagtcctactgggacaaagtttcagagggagagagtgggctgggctggtggctcatgcctgtaaaccccagtcaggctggaggctgagacagaaggatcacttgaggctaggagttttgagaccagcctgggcaacatagtgagactctgtctctacaaaaagtgaaaaaaaaaaaaaaaaattagccgggcatggtggtgcatgcctatagccctagatgcttgggaggctaaggtgggaggatcacttgggcccaggagttcaagtttgcagtgatcattccactgcactccagcctgggcaacagggtaagaccttgcctctaaaaggagagtgagagagagagagtaagaaccaagccatggcaaagctgatttttagataaggcctgtaagtcttaaaaaaaaaagtattcatgtgttaccaagctcttgcaatattgattattaacaaaggtcttttcaactatgtgtatatttcctagagctaatatgcagctttattttctttatgtgatctgggtacctttagtataaaattatgagtaaaatatcagaagctgtttcagtaagaaagggcactaaggaaagaaattgttaggcatgttgtgtgaggtggttgggggtcaggtcagtggaaaggaacttttccagctgagagctgatgtccatcatccatcagattatcctgctggggtgttgatggcagcaggcttcaagtgtgggggccaggtgggcaacccagagaaagtcacaggaaggtgaagctggggtgtggggcctgggcatcccttggagctaggtagagggatagtcgtgggacaggtgatccgaataacaaaagaacaggtgagcagcagaggctcagcagaaagtcaagaattagatgagtcaatgtggaaggggaagaaagaaataataaaataggccgggcacagtggctcatgcctgtaatcccagcactttgggaggctgaggtgggtgagtcacttgaggtcaggagttcgagaccagcctgtccaccatggtggaaccccgtctctactacaaacatattaaaaaagtaaattagccaggcgtggtggcacatgcctgtaatctcagctactcgggaggctgaggcatgagaatcgcttgaacctgggaggtggaggttgcagtgagccaagatcgtgccactgcactccagcctgggtgaaagagcaagactctgtcaaaaagagaaaaaaaaagaaagaataaaatagagaagccaattggaaaccaggaatcagagattgaagagattcaagaaactatgctgcagaatccaggcaatcatgtgagcttttattccatattagttctgcctgaaagaaatgattatacatctctgattctttcagcttcagcagcaatctttgttcatctagctattatgtgaagatgcactcataagaagcctgagtaggtagggtgtagaaggacacacagaaaaagagcaacagaaactagtttggggcttgtttcaaacaagcccggacttatcttccatgctgagtacctgtacacagctctctaagtgggaccaatggagtcagaggaaaacaggaagcagtgaatcagctggactgtcaagccacttcgtttaagacagaaaccagctactggttttctctgtcaggttagagggagcacgcagtctaatgtgaacaagcaaccctgagctctggacttctacattcaaggcaaagctggatagaagaaacgcaagtgctagaggaagggttatactgctactctattctaacaatgtatcagggggatgtagagcgactcactcagtctttgggaaagcatttggcccgtatcaagaacctggacaattttcgtaccctttgatccagcatttttatttatgagaatctagtctataaaagtgattattgagtgcttactgtgtgcgagtctttgtgataagcactttgctaattaggtctaatccttctcaaaacctgggcagtaggcaatatttatcttctttttacaaaggaggaagttgcaactttggtgcataacttgtctcagattataccgttaatgggtgcagagctgggatttgaatctagtttatttaaacactaaagttcatgcttcttttctataccactgctgtgtccaaacagtgaaaaatagaaacacccttattgtataatatacaattatactatattgtatattatgcatataattatgtcttataattatatataataattataatagtaaggggatagcttaagttatcaaatactcacttgatgtaataggttgtgaggagatggcagtaccattaatggaaagatgcctgtgacccaggaggagtggatataaatatatctggactatgattacaaataagtgcatgtgtttgtgtatttatgtgtattttgttttaccttaagtaagagtctgcgttaaggagaatttcatggagtccagttgcaggaggtatagctaggcctggtaggagctaagtaaggcattctctgactccctccctctttctttatctggtctatcccctccctttgcagggtccctcattcggcttttctctgagggtcttctctgctttctgcttttcttgtggaccaggctttttgctcactcatcaatcaacatgcacatagtttaaaagactcaccttctgtgactttcttgcatctatatgatgtgtagttgttccagtacccaccatattttggctaaactttctggtctgagatgacattctctgtctttcagaaaaaaagagaaaaatgggataatgtgatgaggagtggctgccggattggctggatctgagtcaggtgttcacccctgtgcatatgaggcattaaccccatggctcactacccacttggaggtgctgtagatccagcttatctgggtaggggtcacagaaggaacagtcaaatggctgatgtcatacgcagactgaaaggaaatgcattaagcaaatgaaaggaacgaatatggctggttagactgatatttaaatgaagctttgtagtgttgtgacatgtggcattttacatcattcttttaatacaaactctgcataaggttacatactattgatcatgaagaacttgatttttactccagatatatcatttaacccagcattcccattactgggtatatacccaaaggaatataaatcactctattatgaagatacatgcacaagtgtgtttattgcagcactattcacaatagcaaagacttggaaccaacccaaatgcccatcaatgatagactggataaagaaaatgtggcacatatacaccatggaataactatgcagccataaaaaggaatgagatcatgtcctttgcagggacatgaatgaagccggaaaccatcatcctcagcaaactaacacagaaacagaaaaccaaacaccacatgttctcacttataagtgggagctgaacaatgagaacgcatggacacagggagaggaaaaacacacatcggggcctatcgggaggggtgggggagggagagcatcaggacaaatagctaatgcatgtggggcttaatacctaggtgatgggttgatgggtgcagcaaaccaccattgcacacgtttacctatgtaacaaacctgcacgttctgcacatgtatcctggaacctaaaattaaaaaaaaaaaaaaaaaggatcttggttattacagatgcatctccttggatttgcttatattctttgtgaggggaagagactcagaccatatacactatgatttgttctgttgctgattacttttataacaagaccactggaacagtaaaaagggctacaataccctctggtgaacaaactgaggcaatgctcttgaaccaagagaaccagaaaaggcacattgatgctctctaatggttaagtgacaagtacaagcttaattgtccaatgatgtgacagttgcccaatgatatgtggtacaaagagtcagggcaagagatatcaggcaaaatctaaagacaagacttcagaatcatggaatattacacatagcagggactttggaaatcagctagcccaaccacctcattttatagatgcagcaattatgaccgagagagattatgtaactggaaaggccaaggtagcggtaagccaagtgtggaacacagatcttgtaaaactcatgcctgggctcttgttaggatctcagtgcatcttgaagctaagtcagactttgactctctggggagcccttatagtcttcctataaagacagaaactaactgctgaggcttaaagatataaaacaaacaagaacaccaggcatggtggaaatcaggacctctgtttattcagtcggtcatctgctgattgagtgggtctgttcaatcgtgcatgtagccattcctctatttattaattccttggacatgtattagctgcttcactgtgtggttcactgctaggcatggagagtgtaaagagagatgattcctactttctagaaactcacattctaatgggggacagatgtctctgccaatgtttgtgatgtaatgatacctcaaagggaaagtgattattaactgcttggatcttgaaaggtgaatgggagaatcaaggattgggagtggacagtcaaagcagatacagctttggtctgtggggcaagtgaaatgacacgagtatctagaaaattctaaagttctgtatggttgggatgtaggggtcacctagcagacccgtgagagatgagataggagaaatagacaggagccagggtacagaaggccttgcagttgaggaggcattgattgcttgacttcaatatactatgaagtgctgccgagagagggtttcttccagcagctagattagcatcattttgtattttagactcaactatgcatctatgtcccttagcaacaggtttttgttaatattctgagctcagaatggaatggatagccaaattggctttgaagagctttcctctggcaaatctacccctaaaagataccaacctttacagagaagagagtttgcatgggttgattagtactgaatgtagttttctttaactaccatttgatgactcaactcataatgacattttgttggcatttctccaacttgcacttgcctctgttcaacagggcatgccttgaggtctgattatacggttttcattcatacgacatgtctccccctctgctttttgtaacttaacattcctgcctgccaagaacgagggagcttgctggctctccccattggcctcttccatgaggtcatgtgagtgctgctcactcacatttgagtgcctgccactctggaggttttacagaacagaaaactcagcctctgtgttctagagctggagcttctgggcctttggaagtcagtcttaatctctgaaacaggagagtgctccagggttccagagtcttacaaaagtgcaggaaaatgcaccaaggttatgataaaatgcaaagccacacctaacatgggctcttccaaatttcataagcagttcacattattttttatttttccactttcttttttttaatcttgaaatttccaaagtctgtatccacagccttgcatagttcttagcaacaaacttagcaacaaatcagagaaaaaaattagttatctatatttttaacaagatctgtgatctcctccacatcctctaaccgccttgggcctcagtttttttgtctgtaactggacggtcactacatactattatttaaagaattacctaatttgattaagaaaatccattaagcccaaaaaatgtgaatacagagatagggtacaaaagcaaaagtgtaaaattaagacaggtgaatgctagcagatgaaataactcaaacattttacctttcctgcactccagttgggctcaaggatatcatccatgcttttgtttttggttgaagcttgaaaaaataaatgacttaaaccatattctaatagtaacctgaatttatatataaaactgacccatgtttgttttccaaaatgcatttttccattttcactctgctaggaataaaagataaacaatggagatagaggaagaatggcctttgaataagaattgtaaatgcggccaggcgccgtggctcagcctgtaatcccagcactttgggagtctgaggcaggcggatcatgaggtcaggatttcgagaccaacctggccaatatggtgaaaccccgtctctactaaaaatacaaaaattagccaggtgtggtggcacatgcctgtagtcccagctactcgagaggctgaggcgggagaattgcttgaacccggaggtggaggtggttttgagccgagatcgtgccattgcactcctgcctgggtgacagagtgagatcctgtctcaaaaaaaaaaaaaaaaagaaaagaaagagttgtaaatggtagaatgtaaaattaagaaaggttgtgaagttttcaaggaaagaacagcattggctttgtgagttggtttagatctgatgttagtaaaagttaaaaaaaaaattttcttttcttttttagacagagtcttgctctgtcgcccaggctggagtgcagtggcgtgatctcggctcactgcaacctccaccaggttcaagtgattctcccgcctaagcctcctgagtagctgggattataggcacccgccaccatgcctggctaatttttatatttttagtagagatggggtttcgccatgttggctaggctggtctcgaacttttgacttcgggtgatctgccctctgtggcctcccaaagtgctgggattacaggcgtgagccactgtgcccagccgaaaaaacaataatttcaaatatgttccaatcatttggaatcgatttaaaataaaaaaaaaaaaaacaaatgtgctgccagcattagattgttagactgcaaacaacactttaaaagaagtgaacagctgtcacacttctctgtcctctgtagagatttagctttggaaagataacaagtttgtaaattaacagatctcatctaaattccatccttttcctggagcttctgctatcctaatccctcaccctccaagagcacagccctttgatttacttgatccaaagaacttttacttcctttcgctcactgctggatatgctaataggtagggttaaatgaaaattgataaaaaaaatactataattatttttgttttataatagtgattgtacagtaaatattttttatatagttttacaaaaatacctatatgggagtttgtgctttggttatttaaaccttggaaagaattttaagaattttaagaattttctatcttgtttacaatgttttatcctcagattcaggctcggtgcctggcacgtagtaggtggtcaacaagtacctttagaataaataaattatttttatcagtatccagggcgagccttatgcaaacttataaagtggactaagttggtttttgctaaattcatcctcccttttctagtctttcctcttccttcttctcataggagaatatcttgtcacacctgcagaatcctcatgtgtcctctatatagttgaccctgaacaatgtaaggattagggacactgacccccccatgcagctgaaactttgcatataatttttttctctctctctttcttctttttttcttttcttttcttttatttatttatttttttagacactgtctcactctgtcacccaggctgctggagtacaatggtatgatctcggttcactacaacctccatctcccaggttcaagtgattctcctgcctcagcctcccaagtagctgggactacaggttgctgccaccaggcccggctaatttatttttatttttagtagagacggggtttcaccatgtaggccaggctggtctcaaacttctgacctcaggcgatcctcccgccttggcctcccaaagtgctgggattacaggcgtgagccaccgtgcctgcctgtatataacttttggctcccctaaaacttaagtgtcaatagcctactgttgaccagaagccttaccaataacatacacaattgattaacatatattttgtatgttatgtgtattatatactatgttattacaataacctaagctagagcaaagaaaatgatattaagaaaatcatcaggaagagaaaatatatttactaagcggaaatggatcatcataaaggttttcatcctcatcgtcttcacattgagtaggctaaggaggaggaggaagaagaggggttggttttgctgtcttggggtggcaggggtggagaggaaggcaggagaggcagacacatttggtgaaacttttattgaaaaaaaatccacatataagtggacttgtgtggttcaaacccctgatgttcaagggccaactgtatatgtatatatttttattgtggttaaacacacataatgcaaaattcaccattttaatgattttagagtatacaattcagtggccttttgtttattcacaaggttgtgcaatcatcaccactatctaattccaaaacactatcatcatcacagaaggaagccctgtacttattaaggtgttgctcttcaacccttcttcctgcagtccctggaagccgctaatctactttctgcctctttggattcacctattctagatattcctataaatggaattatacaatgtatggccttttgtgtgtgacttctgccacttggcaaaaagtcttcaaggttcatccatgttgtagcatgtatcagtggttcatcccttttatagctgaataataattctgttgcattgctttaccacattcttctctttatatttcctatgaaaacctagtatctggagagccgctgaaaaagtagccaataaattacacgtaagtgtagctaatagaaagtgagttgagaactcatccaggggaatgtgtgttgctcctgtggtggaatctcagggatgaggaaacctttccgagggggacaggagactttctggtgccacatgaatggctgacttgttgtaaagctaagtctaccaatagctatgggactggaaaaagcattgcattgagtagatggacacacaggttttgattctggtttagatgtaactaattgggttgcctgcatttccatgggtccaatgtttctgcttgttgttttggttaccttgggtttggctttctatcaggccttctgctaagctcatttacatgcattatctcatttaattcttcacaaaaaattatatggaagtcatagaagactaaatacaatagctgaagttttactttcagtgaattgtgagggagagattcaaactcatatctgactctctttagcctgagctcataatcactatatggtaggagctggcaaactatgaatctctgcatttttttgtacatcctctgagctaaaattgttgatacttttattttttttctttttaagatgtggttttgctctgtcacccaggctgtaatgcagtggcaccatcttggctcacttggcctcccaggctcaagccatcctaccacctcagcctcccaagtagctgggactacaggtgcaccaccacactggactaatttttattttattttatttttgtagaaatggggtcttactatgctgcccaggctgatattgaactcctcggctcaagaggtctttccaccttagcctcccaaagtgctgggattgcaggcatgagccaccgcgcccagctggtacattttaaaatgctttacacgagtcaaaagaatattttatgaacctgaaaattacatggagtttaagtttcagtgtctataaataaagttttattggaacacagccctacttgcatagctctgtgtttgtactgcaatgatagagttgagttattggcacagaaactctttggttcaaaagctctaaatatttactatctggccctttaaagaacatatttgctggttatcattcataaaatggaggcagagaaagaattaagtcattcctcaggtccctttcaacttaaatgttctgagaattgcagagaaaattgcttacatcttctgttttcctatgaggtctccatctctccctgccctctctcattctcaacagttgagtttgcctcttttcttaaaaagattgagtctatctaaaatagatgcctcatctccagtcatacatccatatgctgacttcccatctctctctctgtatgtgtcctttcatcaattctcgatttcctctattctgagaaataacaatattaccatttattagatgcctgagatttctagcattctacagagttgtgaagaaggttcagagatgataaatgtaaggtcaggcttattatttccatttctggggtgagggagttgaaggttgaggaggtcaaattgcttttctaggttgtgtcaattagtaagttgtggtgccagagtttgaacacgtctttctgatcaaagggactttacttctcttgtctgatgttatctttgctctctgtgcaccaaaagccatctcctccacaccacactccaccctgttcttctgtgtatgccctcttgatttcttcccttctttttctaatcatttcttttggtattaagtttgcctcctgagaacaacattcccttaggccagctcgtcttctagctaaaatagctactttagctgctaagaataggaatagcatttcttgagccattacattcacacaccagacactgtgctaaatactgtataagtgttgtctcatttaaatttcataatagttttacgaagttgctactattattaccattaaaaagggggaaaccaagccttggaaagggtaagaaattatccaagggcatatagttggaaagaatctgaatagagacttgaaccctctgtactttctttttttttgagatgaagtcttgctctgtcacccatgctggagtgcagtggcatgatctcggctcactgcaacttccacctcctgggttcaagtgattctactgcctcagcctccagagtagctgagattacaggcacctaccaccacacctggctaatttttgtgtttttagtagagacagggtttcactgtgttagccaggctggtctggaactcctgaccttaggtgatctgcctgccttggcctcacaaaatgctgggattaaaagcataagccaccacgcctggcctagacttgaaccctctgtactttccaatcagtatgccttacttccctatccctaccccagcctcacccaatataactcatctcctcttgtgacttacagtggtcccctctggcttcttccttttcaataccacccattctgttctgcatctcatagtgtgatacttactttctctttaatactaacattgctttcacagctcacctgtgacttcttttatcatttcttttcactttagagaacttcttttagccattttttttaaaaaaacagtagatctgctggtgaaaaattctcagagttgttcttcatctgaaaatttcttgatttttccttcatttctgaagggtattttctctggatatagaattctgggttgacaggttttgttttgttttttttttttcacatgaaaaatgtgctgaatccttctagcctccattgtttctgattagaaatctattgttactcaacttattttctcttgatacataatgcactgtttctttctggctactttcaagattgttttctttagttttctggttactatgatatgttttcattaaatttctttgagtttaaactatttggagtttgcacagcatgaatccataggggcacatgcgtgagtgtgtatatatgtgtgtgtgtgtgtatgtgtgtgtgcagataatatatacctttctcaaatgtcagccattacattcgtgtgttatgtgactataggtatagtaaacatatggcattatacttttatggggccacccttgtgtatgtaggacagaaatgtcatgatgtggggtgtgactgtatttttgtttgtttgttttttagtccctcaattaaccaatgaagattgtatgtctttgaatacttttcagcctcaaattctttctcttcttcttttgagatttcaaatgttatatctgttgttatagtttcatatgtccctgaagattttttttcaggtctattttctctctatttttcaaattgggtaatttctattgctatgtcttcaaatttattgattctctgctttgtatcttccattctgctcttgagaccatccattgagtttttgaattttggttgttgtatttttctagttctaaattttccatttggttcttctttgtatatgcgatttctttgctgagatgtcctcttgtcatttgtttcaggcatattcaaatgctcgttgatggctgccttaaaattcttgtcaggaaattctcacttctgtgtcgtttcaatattgattgtttttcttattcagtttgagatgttcctatttcttggtatgacaagtgacttttgattgaaatctggacattttgtgatatccgattcttacttaattcttatgattcttacctaaaccttatgatttagaagatctcctctgacactaacctggtggctgaaagggggtgctgcctccttactgccaggtgggtgtagacatctagattctccacggggcctctgttggcacctggagagaagggactccctgttactgataggtgggggtgcttcaggcttcctcctaggcctccactgacagttctctggctgggagggagaaaggcacttggtttctactccccatctggcctccactgatgctgtagagagggtggttttgctaccactgaacagtggtagaggtcttgattttttactaggtcttatctgacactctccctgtggggagaggaagtaactttcttctggacattttctttgatttgtgctatctgtacttattgaaaatccatttagttacctttttataaacacagtgctattcttactttcctgttagtttgattattccttctgttacctcgactccttcttcatcttttaccttccaaatgtggacgcttcccagagtggcttttctcttgaggtatgctgttgctctaagagcacttcactgtttccagacctctggattttacctctcatgatggcaacttccagatcttgctccctagatcttgcctctccttggatccttaatcctgatggtctccctccttgaaagacacttctgacttcatctgccaccacttcatacttgataactatcacaaaaaaatgcagttgttttgctttctttatcccaattttgtttccttctcaatttcccaacctctgtccataatagcattgttttcataagcctgtggacattaaatcatctggtttctttcttttcattcacaatatatatcacacagtgaaccacagggatggaagggggaaatccaaaagtaactaaattgcagttcaatggtacagaaagacaaacctagttccctttgtccctttgtctttcaacatgcattacctaaggtgtgtatttagggcaaaaagcacaagttaaatctggttctgccaattgtaagctgtgtaaccttgaatacttgacttaacttcagtaatctcagtttccccatctgtaaagtggggatgatgataatagcaactgcagaggtttgattcaaggatgcaataagtttatttatatgtaatacctaaacatatctggcatctaatagagattcaataattatagctcttggtcttctattaatataaaacagtattttccatcctattgctcagtcccaaaccccagaattttcctgcttgattttccaaggtgttttattgtctcttcccacccagaccatccagtttatattcagcttgtttttcacacccaaacatgcattctttcctctagtcagcctcttatctttatttaccttgaatttattgtacctctctcataccttatgtttattcttagaatgtccatttcccctccttccccttcaaatcccatccatgcatttgtcaggcctcagcacaagtgctggagtcttctgtggctgttcccttctgtcctgatctcttcctctgtgaacttcctttgaacttggagtaaccaagcaatagaccatggcagtgtaaggcgccatggaggctgtgtagttcttcccatttggccaggttacaagcttcaggaaggttatccgacctgtttgtggtagtgttagaccctgccctctctacgtcatataaaatattctctgaatcctatacactttgttatattattgaccattcagttgataaaaatctgagcggttattctacagtagttctctgaggtagttactgaagaaagaaagatgggtaaggaccagttttatgtacttgcatgaagtttgtgccctaggtgccacacttgtcttaccctaatccttgccctagtaagactttcacttgtcttgggagctcatcactggggtttagggtaaaggggttgactgacactctcaaaaccgagggaagcacagtggccacagtagagattccgataatgcagagaaagtagtgataagttggtagggggagaggtggaattaagaaagattcacaaaggaaggggttgttgagctgtattttgaaggataagagttctccagaaagaggaatgcattttagtcacagtgataggcctgggaaaagcaaaggaggcataaacatgtcctgtgtggggtatcagtttgttgctacaactgggatgtgtctgggtgtattgtccttaggatattgaaggacaagagatgatgaagggaatgaccaaaactagatttttaaagattatttcactaaaaagtccatgctcttcttctaacatcccattctgcttccatataaaaggtctgagtagggttggtcctaaaatattttagatgatctaatctcctaggtttgtctttctgtaccattgaactacaatttggttacttttgggattcccccctttcatccctgtggttcactgtgtgatatatattgtgaatggaaaggttgaatggagtcaggaggtttagtggcacctcactgggaggttttaggatagagcagggtactctgctggtcctggttgatttcttggccttgaggatgatttctgggtcaatgagttttttgttaaaagaaacgaattcttaccaattttggcaagaaaaagaatccatcaaaagaatttggtgtagctcactccacagggccagagaactagaatcagaagcaatccagctggagtgaagccccgaaacatatcgaaggaaggggtctggtgcaatataacacagctaccaccagttcaccaaactgctgccaataaagcctccccaaccggatggagctgctgctatcattgtcaagtcccaaaatggatcctttgcagtctctccatgtctgcatcactggggactgattctgaggtttcagtggttgcccagggcccacactttagctgcaatgaatgctgggagatgagtatccagcactttaagcttctataagggatagcagactctgcctcaagaggtggaagagtcaccaaacataaaagggaatgaagatggcaaatgcatgacaaacgtccactgaactctccaagttggctgttgcatacatgccactaactttcatttactggagacttactggaaatccaaagcacattttcttttatttttatttttattttttgagatgaagactcactcttgttgcccaggctggagtgcggtggcacgattttggctcacagcaacctctgccacccgggttcaagagattctcctgcctcagcctcccaagtagctgagattacaagtgtgcaccaccaggcccggctaatttttgtattttcagtagagatggggtttcaccgtggtggccaggctggtctcaaactcctgacctcaggtgatctgcccacctcggcctcccaaagtgctgagattacaggcataagccaccacaccagccccaaagtacattttcatcagaaagaaattttaccaactccgaggtagaggaaggaaacttgactcagggaagttaagcagtggagagaaaactcttgggtcttagattacttcctgacctcaaaagcaaaagggctggctcagccttagctaagtctgtctgtcagtaagctaattctggttcatttaacaaaagtgaaattgtaaatgtggacagccctgccttgatttgtgaacaattttcagaaatcaaagatcaaatcatggataaatgttgtttggttcatattaaaaagttaacaaagaagaatacatatttttcttgttttgtagatgggaaaacttctgcatatttaaaggaagtaacgtgttttgggcttacatgactaccagttggtgaacccaaggctaggaccgaatctctccattttttttttaaatattcttctcactgaaccatgagtatttccctataagaattctctttgggtaacaatgaattgtttctaaagcctgcgtcattaagaatactaaaagagctcctgatttatgtgtaataattgggttgacaggacatacacactacctttatttctcattaatagttatttagatgagagatatggtgcatttctctaatctggcttggaaaagtaaagcttgtgcaggtctctttttcttattttgagatatttatactatcagcttcagtttcaaatgcatcaatcttaggtttagttccaatttacttcaatttattaaaatatgtattgaacactgcataagaaatcaaatgggtacacatacacctaaggagttaagggttttaagcaagaaaagaagtgcttattttttaccctgcaataaaggtattttgggtatgcagcatgttgttttaccagctgctaccttagcgttatatttacttttattgctgtagtctcttctggtgattaatagacaccaggatgggggagggtggatctatcatttggcctaagaatatcaagaatcaagccaataattgacagttttccattaagcaacagaactctagcattctgctagggaatgggaacacaatacaaggatacagcctggatttacattagtcaacaagctttttgagtgacacacagaaagcctaagctatactaaatgttaagagattgaattgctggattaagaatcatgttactcaggctaaatcagaagtaggactggctgagctaagccattttctgtacctcagtttctccaccaatgttgatagatatttactgtattccagagctctcatgtgtatcagctcattgctccttcactactaacctattaggtatgtgttgtttcttcctttcacaggtgaggaaaccaaagttcagggaggttaagtaattttctctgaagtcacagaagtagttaattgcagagtcgggatgccaacttcgatcaggggcactctagagccactcagtctcattgcttctgcttaccctgccttttgggtatcatttgagtaccccccacagacgccaaagtacatgcacgaacgcctcctccacccttttacaattgctgtgctttgagcttattgcagaatgggtactggaaaacacaattgctagacttaagaataaggttttttttttttttaaaggtattgaattatgcaattatctgaagtggtcattcattggaccacttgatgttgtggatgatttatataactttgtattttattataacctctgtttcttttttttttttttttttgagacggagtttcactcttgttgcccaggctggagtacaatggcatgatctcagcacactgcaacctccgcctcccaggttcaagcaattctcctgcctcagcctccctagtagctgggattacaggcatgcgtcaccacgcctggctaattttttgtatttttaatagagacggggtttcactatgttggccaggctggtttcgaactcctgacctcaggtggtccacccgcctcggcctcccaaagtgttggaattacaggtgtgagccaccacgcccagcctaacctttgtttcttacatacaaaacagtttcatgtagaagtaggtttgggaattggatttttttaatgtcatttttatatttttgagatggagtcttgctctgtcgcccagattggagtgcagtggcatgatcttggtttactgcaacctctgcctccgaggttcaagtgattctccagcctcagcctcccgagtagctggaattacaggcacccgccaccatgcctcgctaatttttgtatttttagtggagacggggttttaccatgttgaccaggctggtcttgaactcctgacctcaagtgatgtgcccatcttggcctcccaaagtgctgggattacaggcgtgagccaccatgcccggctaggaattggaatttgatgattgcatggaaggcagttgagtaaaaggcattggaggaggaaggagatgaagaaagaaagaaatagagcaatggcttagtttgggccattggggcattcagaagggtgagcattagtgggccagggaagagacagttaatgaaggtgtactaggagtgagcaggagctgagggacgcttattcctagcggggagcctgtgctggggagacttgctgaaggagagactgggctgagtccaggggagtgcagaactgccagactgttgaggtcagttggcaaacagggctgtttcaacccgaaattgagaggctgcatctggaatacagcagaaagaggactgagccgttcttggggtagagatgaagggaagtcagcccgttagcctgggactgaaacagggaggcatctttaaatgcctcttctatcaataaaccctgacagactcacctaaatattgttacagcgtttccctaatttgtcttgttgtttctaatgtatatccccaggaccccttaccccactagcaatggctcaattatctagccctgtagggaaatattgtaatatggttttgtttttgttttttttttttttcaaattcaagtttagttttctgagtgcagaggcctaatttgactctgtttttcactggactctttctaaaaaatcactgtcttttttttcttgtcacttaaatgtagtctaactttttatttaggaaacacagtcattttgcttgtctgcagtgcatggagagtccgttaaggttgctaaggtgcggacctttctgttcccagcccgaagctggaggtctgtggttcccccatggctgtcttgctgcttgctgccgagtctgcccatcactgccttggcctcactcccagttgcagccggccctggccagggctcttttcattctccattgtattttctttctgcttttttttttctcagccacatctccactcttgaccccctgtggctcactcttttagccatccccaggtaatgagaaggctccttctccctggtcagtgaactgattgtttgcggggccggatgtcctcctgctgctttaactcatcctggcgctttgcagcattgctcagagggatttgtcttcattgccggaggtggagttgcctttcctttttcgcctctcttttcttctgtccttgggattcatggcatttccacacactgaagttgttaaaaataaaggcttccttgacaacggaggtgttagtaggtgtagggctggctgggtgtagctgttgcaggtgatcagccatgtgtggcgtgccaaggttaagggcaaaggccggcactcccgggttacagtctttgaaagggatactaccgatctttcgatgacagtggagaaaagctgtaaaggagcgtttttctctttcttttagcattatgaagggcatggattttggagccaggctacctgggttcaaatccctgctcttccacttactagctgtgtagtcttaggcaaattacttaacatctctgttttttaatctgtaaaatggggatgatactggtatccaggacatagagttaatactagtattatatgctatataatatacatcatataaatgttacatataatatatagtacataaactatacatagatagttaatatatgtaaaggctttaaaaaagaagtggtatacagcaagcaggtgctgtggaagagtttactgttatttttctttgttttgcagaagtttttttgtgtggggaggtatatttgagttaaaagcagggatgattattactcctcagagtcctctgaggtgttggttgtcctttctttcttttttctttctttctttgtctttctttctttgtctttctttctttctttctttctttctttatttctttctttctttctttctttctttctttttctttctttctctctctttttttttttttttttttttttgagacggagtctcgctgtcgcccaggctagagtgcagtggcgcgatctcggctcactgcaggctccgccccctggggttcacgccattctcctgcctcagcctcctgagtagctgggactacaggcgcccgccacctcgcccggctaattttttgtatttttagtagagacggggtttcaccatgttagccaggatggtctcgatctcctgacctcgtgatccgcccgcctcggcttcccaaagtgctgggattacaggcgtgagccaccgcgcccggcctctttctctctttctctctttctttctttatctttctttcaagatggagtctcactctgtcacccaggctggagtgcagtggcgcgatcttggctcactgcaacctccgcctcccaggttcaagtgattctcctgcatcagccttccaagtagctgggactacaggtgtgcactaccacacctggctaattttttttttttttttttttttaataattttagtacagacggtgtttcaccatgttggccaggctggtcttgaactcctgacctcaggtgatccacctgcctcggcctgccaaagtgctgggattgcaggcctaagccaccacacctggcctttctattcttattttaaagatacagcattttacaagcagtaggcactgcatgaattcatgtagtttgatttaaaaatgaatcacaataaagtactcggcttgactctgagtctgaggcagtagcatccgaaaaggttggtctccaagttgcctggccaggaggtaaccagatggtgcacctgcaccctccccttggaccagcaaaaattgctcctgtttccacaagtgcttttttccttgatacagagacccttgggtttgggatgaagccttagaggtcatgccctgtcccagccttcatccatgctttgcctctctgaaacaatctggaagtaggacgtgggaggtcaaacttatgattcacatttggggcaacggaatgtcttttccttgagacatttttaagacttgtacttcatgataaagttgagctaggaagtggggccaatttttttttttttttagtttattcattaaacacatctcatgagtatactttttgccagttactaaaaatataaataagaccctgccctcagagtagttacagtctagacagtagagttttgtaaacagaaatatgtaataaaatataagaagagcactatgatagaaagtatttatgacacatgcagacacacaaaaaggagggttctgcttcacctttgagtgaaatgggatgggtggaggtgaatcctgaaaatgtttatggaagagattttatgtgagctggatccagagcattgagtaggtttgcatgagtcagacagggaaaggaaacatactctagacagagaaaacagcgtgaataagggcacagaacctcagcgcatcctggaggtctgagatttgcaagaatttgtcatggctgaagcgaaggcaaacaattagagttaacaatagcgaatggtcaggggctatcagtggtgtgctcaagctggcttgtgtctggcttatgggaactgggtattaaatagccagtcattttgcaagccggttgcaagccggtggtagctggagatcaacagtggtggaaatatttgcaccgtggaaatcagcaaatgctacacattagggccttctctccccaccccacaaaccaaagagctgctttcgcagcagatcactgattgtgaccccttgatgcgactctaaaaattattttaggactcttcagtgcaggcgatgagaagtgaatgtggaaaggttggcagggaagaaacatggtcaggtttgtaatctagaaagacagctctctgtttttggtcttgcccttcaggaaagagacccaagaggggagatttgcatacaggaagtttactggggagtgttcttgggaccagcatttgaggggacgctaacaaagcaggtttgggcaaaggaggagttgaatgaggaaccagctgtaacagattcacctggtcccacagggaagctttggaggtggagtggccctatccagagaggcagagaggtcaggcctttatacccctgtgctgagcatgactggatacaggctgcccctgcagaggggcacataaccatagtgaagtggttctctttccctgagggcagttcctggagaaggctcagcaactagaggagagagtgcctcaggctgaaggtgattctggtggtgcactccagcatgcactgcacaccgctggcagtctggagaatgtatgagatccctggaggtgggtggcaaggaggctgttgggagtgtactgtaatagtccatgttgaagatgatgaaggcctgagctaaagtagcagcggtggggatggaggcagtaggaatgcggcaacaagagtgtaggtagagtctatggacaagttcccctaacgcagtgcttctcaacggagggtgggaggttacccctagggtacatttacaacatctggaagcagtttaggttttcataactggggtagggggagggtgttactggcatctagtgtgtacaggccggggatgctgctgagtatttgatactgcccaggaccatccccacaataagaatgggcaagctcaaaatgtcagtagtactgaatttgacacattctgccctaatgatattaggagtaagggaaaggaagtataagatgcctaccttctctgttcctgccttggatgtctgagtattgaatccacaattcattaccagatagctaaagggaagataataatttacaggtggatagagaagagacctttcatcttgtaagcaaatgcgtatcacattgtttttaaagccctacctgcctcataggaaaatttcaagaaatctagataacagtagattcacatgtctttcccactgtcttccttccagaagattaaagtggagtttcatttctgtttaaaaacacagagataggtgtaggtgaaagcaagcaaataataagacagatgaggggctcttacaatagcctctgttttttgctaccatagtaaaaattttgcaaagaaatagtagaactatggggataattttaaaatggattgtttaggttttagcaaagtagcaaagcagatgatgacaattaaatttaattaggcaaaagcagaagttgattagggcgataaggatttaggtcgtaccaaagcataatataaaatgtctttgtttgcgtcttaacattggcatattcaattatagtcagttggtgatgactttggtgctgtctttcatttggccgaaagctggttattgcatagagtgacagcctcaaccaggtgctctgtgatgtccctgtcatagctaagaagccaacaccatttaagcgttgggacgaagtgactcatggagacactttgccttttgctgggaattacctgatgacgcagagcaggagtttggcaggaacaggagtgcagatttctgggataggcactagtgggaggagaataaaagggagatgcattaattcctggtatgacaaactacgtgatagaactagagcagtggtctgaaaactttttctgtgaaaggccacatagtaaatatttaaaattttgcaggccatacagtctctgtggcaactctgctgctgtgaaggcaggcagatgacaggcaaatgaatccaagtgctgcattccaataaaactttatttaccaaaagaggtggtgggccagatttggcccttgggcagtagcttgctgttaggtgtacttgaaaaaatgattttgctgcacttaaaggaaggtgtggacatggagatgtaggttcgactgtaagactgatgattaagggggtcaaacacattcattttctttcctttattttggcctctttctcctgctcacctctctccttttaagtaatttagaatgcatatgtatgcatatatatttgaattgcttattgattgataattttctattcttttttggaagtcttgaatagtaggagaaaccttttctagtcctctcttttagccctttgtaaatgcaatttagcaatttttgtcttgggtatagttcttagttacattttcttctacttgccattcaccttgggtgtaaattacaattacctgggaaacttttagacatctcaatgcccaggctgagtttggaacaattaatcagaactccagggatagcccaggcatcattatattttaaagcttcccgggggattccaatgtgcagccaaggctgagaatcacgtccttggatttaaagaagaaagaaaagtcctgaacatttgctttagatgctggaataaagaaggaaatttacccatgtaggtaacctttatggccctccagttatagccacaaacataggagttttcagattttaaaggctattttcagaaaaacgtatttcctagtgacacggtcaaaaactctttgttgtggtttggtaggagcaataaaagaaatatcaggaagctattgggatttgactgatgtctatatttctagccagaagcgcttcctccatcagtgagtgtggtgacagcctttgagctttgtgaaagcttccaggttccagtgattaagccattactcctagaagccagtcttaccagagaaaatgatcagggcagatgttctcactgtgtccggagggcatagccttctaacattatcatgggtgcatacataaatgatgatatttctttctttctttttctgagaccaagtcttgctctgttgcccaggctggagtgcagtagtacaatctgggctcactgcaacctccacctcccaggttcaagtgatgctcctgcctcagcctcctgagtagctgggactacaggcacgcatcaccatgcccggctaatttttgtatttttttttttttagtagagatggggtttcgctatgttgaccaggctggtcttgaacccctgacctcatgatccacccgcctctgcctccaaaactgctgggattacaggtgtgggctaccatgcccagcctaactgatgatatttcttagagataacctatttgactaagctaaaggtaatttttgttattaaggcaacataggacaattcaaaaggtaaattcaaggactatttgataaaaatatgtggaaattcatttgaagatatagatatgggtataataatattttgcaggtaggaacattttaaagggatcttatggcattttgcttacaaacatcgttcttttcgttttacaaatagaaggtctaatcttatgacactgaattgctcaagcatttaataggctaaatttcaaagacttagtgctttctttcctaagcaagagttggagagtcattcttactattattatttttttttttttttggtggaggggaggtaagggtacaatgttctgaagaattttccagctaggagcaaactatttttaatgcctattgcaacttcccaagctccattatattggagatatgagagttgcttcatttagtgagggataatggaaagagattaggattctgtccactgcatgtaaacaaacacccaacaaaagtggttgcaacaatagggatttattacaccctttatgaagataactggatttatactgttccagggctgattaattcagtagtttagccatgccctggtgagggatggtatccctgcaattcctgattacctgactttttctttctggtcacaggagggctactgtagctctaaatatcatgatgtaatatgacaacctcgaaaggcaggaagagaggacagtatttctcccctgagtctcattatttttaatcaggaaggaaatcttttcaggagctcccagccgactttctcttaggtttcgaacctggagcccaaagctgtgtcactttttcattctcaaacctgtcctgtcaaaggcggggcattatggttggtgtaaactagggattagcaaactttttctacaaacagtgagatggtgagtatttgaggtgttgtgggccacatatggtctctgcatattcttgtttgttctttttccctccgcccttaaccctgtaaaaatgcaaaaatcattttttggagcttaagttctaaaaactgatttgtttagttatagcatgaccaaccctgcagatatgcctgggactgagtgggttcctggactttcagttttttttttttttttttttttttttaagacagagttttgctctcgttgcccaggctggagtgcaatggcgcgatcttggctcactgcaaactccacctcccgggttcaagcaattctcctgcctcagcctctcgagtagctgggattacaggcgcgtgccacaacacctggctaatttttgtatttttaatagagatgtggtttcaccatgttggccaggctggtctcgaactcctgacctcagtagatccgcccgcatcggcctcccaaagtgctgggattacaggcgtgagccacagctcctgtcctggcctttcagttttaaacccagaaacatccagagcaaactgggtgtagttgatcatcctgtttagtggaccttctaggaacctggctgtggctggtctggagcggtgagtgcctatgcttcgggcctctttggcggaaaataacacctgtgtcttgagatgtctcttctgttccattacagagaagaaacttggttagggatggcctggggtttgtattgagtcttattttaaagtaaggcaattttatgtctttagaacttcaggaaatcattgattctagagattggcttgaattacccttctccattgtaattatcagatattgaaactcattagagtttggtctactcagagctacccaactgtgacgttcataaggtggatggtaattggagggtgaggtgttgttgtgtacagagatttgcttgactggatcaattgttttctcagtggggtctaggcatctggtgatgtctgccctaagtgatttttccccactggtctgtcaccactaaaccctgttatttctacccagagatgtctccccacctagccttcctccttcatcctagttaattgctttcttgtgggtattgaccatttcatgagtactcttaccccacctgcccttatctagagatgtttttcatcactctacaaatccctgccctgcactgctgctgactatcttcctacaacacatctgtccccacgcttccgttttaaagttgtccctgctgcttcctttggacacttccatttgactgataaatgccagcttcttagcttggacgccctacctgacctactgcttcacggccgtgcatacggaatcctctcacaacccacgtttttgcatatgctgttcccttctagaacatctccttttccttgtggaaccatcctctctgatctaaatcaaatgtcttctctgtgagacctcctcagcaagagttcctaccccagagagacttcagcatctctctacaatggtggtttcttctgttgaaggatgcagcttgggatttagcagatcaaagcatggcccctgctagtccttctaattacctttgtgcattaacaggaagcatttgaggaaggactcccacgccagcaccattacactattttccctgtcttatctgatgcctgtggacacgtttatcccctaggttgagtggtatttacctggaaatcttcagtgtttggcccacagttggtatttgtatgaatgtctgaatgaacataggagctcaagttggaattttcataggggatcctcttcttattaaagtctgtccttccctgggggcttgctactccaagtatggtccctggacttgcagaccagcagcctggcaacatcagggagcttgttagaaatgcaggcttgcagctgggtgcagtggctcacacctgtaatcccagttctctgggaggccgaggcaggaggatcacttgagctaaaaacaaacaaacaaacaaacaaaaattagctgggcacggtggcctgtgcctggaatctcagctattcaggaggctgaggctggaggattgcttgagcccaggagatagaggctgtggtgagctatgatcacactactccagcctgggtaacagagtgagatgctgtctcaaaacaaaaccaaaaccaaaacaaaacaaaagaggcaggatctccaatctcaccccagagctgctgcatcaggatctgtcttctagcaatgtctgcagaagattcctgtgcacattaaagttcgggaagcactgctctaggctggtctcaaattatggcccattactacctataacacaataccttagaattaagggagtcctaacaaaattgcaactgcctttcttccttccttccttctgtccctccttctttctttcatttttttcttggaggcagaatcttgctctgtcgcccaggctggagtgcaatggtgccatctaggctcactgcaacctccgccttctgggttccagtgatcctcgtgcctgagcctcccaagtagctggggctacaggtgcccgccatcaagcccgctaatttttgtattcttagtagagatggggtttcaccatcttggccaggctggtctcaaactcctgtcctcaagtgatctgcctgtctcggcctcccaaagtgctgggattccaggcgtgagccactgcaccctgccgctccttctttcttaaaatgtacattcaaggacctgccctctacctactgaatcagaatcccagtggggagggccactgtattttaaacaaatacctcaggagattcttatcaccctgaagtataaggaccacattccagggcaaattttaactctttagttgtctctgattttccccaaaaccgtggactgaagatgctcaccttcaaaattagtgttaactctgttgtggtctatacccatctacctttccagtttccctgttgctgttaatagcactatcgttctcctactgtccctagatttctacctggctttcattcccattattgaaatactcttaccttgtgcagtgtctccacgtttcaggaaagaaaagaagaagtttttgttagcatctgtggccttttctagtaattgtcctgtttctttgcaggtgttactttcctgtcaagttcatggtgtgtcgcccctgtcctcgttctctgttgtagtctgccttctcttcccacttctccaccaaaactcttctctcaaaagtcaccagggacttccttattttcaaattcactgaccttttggagcacattaaagcaaacctcttagaggttggcaaccttataaaaaaatttgtatttggttctaacctcctttgctggtgtgcaaagttgaacatgaatagcaacctctaagccagagagaaattggatcttactgtgtctttacttgccagcccccagggtaggaaagtagttggtcactgaaagtttttatacttaaaaacgtgttttacaaattcaggtttactgtgattttttttaaacattaagctagttattttaatttctaattcctttgattactgaattccttcaggcaaataattgcctgtacttttcttgtgatggttaatattatgtagttgattctaactagaattttcccttgttttctggaatgcacccatattcagagtaactaaataagtcattatctttcctttgagaatatgggaactaaatctttacaattcaaggaaaagagaagaacttagattaaaaggaaatagaataagaaatacatacactggggatcatgcctataatcccagaactttgggaggccgagataggtggatcacctgaggtcaggagttcgagaccagcctggccaacatggtaaaaccctgtctcaactaaagatacaaaaattagccagatgtggtggtgcgtgcctatagtcccagctactcgggaggctgaggcaggagaatcgcttgaacccgaaaggcggaggctgcagtgagctgagattgcaccactgcactccagcccgggcaacagcaagactctgtctcaaaaaaaaaaaaaaaaaaaaaaaaaagaggaaaaaaagaaatacacaagaaatacatagattgcaaggtgtctttcttaaaaaaaaaattttgtttccttcttcgctgcctccttccctcccttcctctttttcttccttcctccctttccttcatcctgccttctgccttccctttctccctccctttcttctttccttttcccctccttcctcccttcgttcctctttttcttccttccttcctttccttctccctgccttccaccttccctccctccctccctccctttcttctttcctttttaccctccttctctcccttcctcccttcatctttttctttcctccattctttctttttacgtattcatcagacacatcccagatagcacattaggctctggggatagagcaatgaaacaaaagtggccccttgcctttgagatgcttccagcttagcatggggcagtcctgtcatcaaataaacataacagattgctaaacatactgggaaagtcagggtccagtggtgaggggagggtgtcatgaaggtggggtacatggagaaagggtggaaactcatattagaaggacaggtgcttgagctgaatgtcaaaagtttgcaccattaggaagacggaggtatttaacgcactgcagatacatgagcaagacccggaggtgtgaggttacctggtgcagctgaaggagtattgagagatgaggctggggcaagcaaggaggaacgtgttgggattttaatgtgggaagtagcatgaacatatgtctgtgatggaggacagtggataggagaagtttactcctcaaaaatgagagatcagtaagaaaaccagtgcaaaagtctagctaagacttgttagaccagggcacagtattttgttgttgttgttgggatagggtcccaatgtgtcaccctggaatgcagtggcatgatcatggctcactgcagccttgacctcctgggctcaagtgatcctcccacctcagcctcccaagtagctggaactacaggggtgtgccaccacccttggttaattttggtgtttttgtagagagggggtgtccccatgttactcaggctgattttgaattcctgggctcaagagatccacctgccttggcctcccaaggtgctgggattacaggcctgagccaccatacctggttggggtgcagtattaagaagtgacatagagtggtagaaacctggagaataggttgccgtgggtgagccgcacggggaaagaataggctgaagacagaatcaacctttgatcaggaggagtgaaggaagagctccttagagaagtaggatgtgatacagattcaaaacactcaatatccctttctgactaacaagaaagtcctttttctactataaaaagcatatagtaaaagatgtgagtggtattcccttattcctttgccttctggagtaactcacagcaaattgactcccctttcaacaagacagctcttgaaatgattgaaagaaaactctcatgactttccttaatctcttcctccctggtttatgtactcctgggtgtcctcactgctctgtatgtgacatggtttctaaaccactcacctgccctgtgaacatagccagcagcacgtggtcccgatgcaatggaaagaatgagggcagtgactggccctgtcttcatccttttctccttcagcggagatttatttcttccaatttctgcagccaactctgtgggagttgttgggttggtgaacccgaggggtggaagagacagctctgggaccactgaatagcctagctttgtttaggggcatgttttcctgactgtttatggtgcctgacagggttgtttttgttctggggagagctcatttgataaagcaggctgctgagaaagctgtggggctccactttttctggggatatctccaaggccccccagggagctgcgatttagcatcccgcaggcaccccttgctcacggaggtcatctgaggccctttgcatcctcgtcccaagtctaactcagatagtggaggggagagaaactgttgccagcttcaccagcttaatagtagtcaggaaggagttcaggccagcaagattccattttaatcgtcaatcacacattaccaaataaaaaagaaagaaaaagctgcagctgtgtgccactcttcataacttttcctccgtggttggcagtcagattgctttcttttgcagaaaacacgatgtcaggtttagtcagaatttatgtgtagaaattcgcaaggaggcagtttggaaaggaaggtgaaattagtgaggttttagttcgcacttgggacgaattacagacattcgggatggtggcatgcgaaagtatgctgcattttccttctcagcgccccctgcttcatctcatagccctgggcacattgcagaatccttcacaggcagggtttaaatatagcaaggcacaacactggccatagaggacacgagaacctctacctcagttagcaggggacaggttagcacctcctctatccaggggatggactctggtcagctgattggtggcacgtacattattacgagagtaaagagatgcttggctggtctctgtggactccagcacatgcagtccctccataaaacgacaagagaacacagtgtgctactgaacgccactagatctgtattgagccatctacgttttcctctagagccatgacaaagatggtttttcaagtgaattctagaccagccatctaaggagctttaggttcaagtcccatttccaccccatttgagtttgacggccttgggtcaccttctcaaccactcagaactacggtttctttttcaatatgtgtataggccatggatatttttgccctgcatacgtgaccctgtgtgattaagtctcggcctcatttctgggcctctcctgcactattctcctttttcacactccgggcgtcagctagatgttctgcaaagcccttggattttccaccttcatgctcttgttcttgctgctttccttccccttgcccttagaatgcccttttctccatatttgcctttaagaagtcatgtttttggccgggcatggtggctcatgcctgtaatcccagcactttgggaggctgaggcgggcggaaaacgaggtcaggagatcgagaccattctggccaacacagtgaaaccccatgtgaaagaggcccagcaatgacttgtcttttttttttttttttttttgcctttcatgggcagcacgcagggtgctttctggctgataaatccatacggtcaggattggctgactccttcacggtaatgggagatgtatttgacactgctgcccctgctgacctgtgggtgcaccagccaccgggacacctccatgagacacagtgttagaggtttatggctaagaaactgatttgaagtgtgtgaacgtgtgccaagaaaaaatgattcggcttttgttattttataatgttcagataatcaatatgaagcatttttttacattttgctttcacgtacatatatgtatgtgtgtatatatatgtgtgtgtatatacttatatgtatatatatatcactatataatagtgaatatatgtatattattcactaatatacatatatgtatgtgtatatatatgtgtatctataattatatgtatatatatcactatataatagtgaatataagtatattattcactaatatacatatatgtatgtgtgtatatatatacacacatatatgcacacacacacacatatgtatatatatatacacacgcaatcttggctcgctgcaacctccacctcccacgttcaagcgattctcctgtctcagcccccagagtagctagctccctctctctctctctatatatatacacacacacatatatgtatatacatacatacacatacatatatgtatatacacacacacacacatatatacacacaaatacatatatgtatattagtgaatctacttagaaagaattttattttgaaaataagctataaccaacaatttgggaggccgaggtgggtggatcacctgaggtcaggagttcaagaccagcctggccaacatgatgaaaccccatctctactaaaaatacaaaaaattagccagggatggtggcgtgtgcctgtaatcccagctactctgggggctgagacaggagaatcgcttgaacctgggaggcggaggttgcagcgagccgagattgcgccactgcactccagctatacattgcataggctcaccagtacaacaaaaccagtttgttgattgataaataaatatttaaaatattgtatgtttttattttattttttaatttatttacttatttttttgagacggagtctcactcttgctcaggctggagtgcagtggtgtgatctcagctcactgctgcctctgcctcctgggttcaagcgattttcctgcctcagcctcccgagtagctgggattacagtgtctgggtcttaggttcctcatctgtcaaatggagacagtaatagttgattacataattttcatgaagattaaatgagttattgcacgtttagtatagtgctttccccttataaacactcactacttatttttattttttattttttacttttgagacagagtcttgctcttttgtccaggctggagttcgagtccaggctggagtgcagaggcacgatttcagctcacttcaatctccacctcccaggttcacgtgattcttctgcctcagcctcttgagtagctgggactacaggcgtgcgccgccacgcctggctaatttttgtatttttagtaaagatgaggtttcactatgttgcccaagctggtctcaaactcctgacctcaagtgatccgcccatctcagtcccccgaagtgctgggattacaggtgttagccgccgctacttatttttgtaagatgtccttttatctttgatagattatgtacttatttatttatttgagacagagtctcgctctgttgccccagctggagtgcagtggtgtgatctcagctcactgcaacctctgtctcccgggttcaagcaattctcctgcttcagcctcccgagtagctgggattacaggcacgtgccaccacgcccggctaatttttgtatttttagtagagactgggtttcaccatgttggtctggttggtctcgaactcctgaccttgtgatccctccgcctcggcctcccgaagtgctgggattataggcgtgagccactgcccccatccagactgtgcatttatttaagagaataaatattgtgttcatttttacagacccccacagagcctgatgcataatagctccttgataatatttgttgattgaatgaatggtagctattttaatggtcagagccacctggactcatttaagttgcaatctatgcatacgagattggaccatatccaggcaagaattccagattcatcctgtccttgtcagtaccctagttgggttaactgaaatgactgcctggaacacaaagtctttaataaaatgatattactatgctctataaatctataagttacagcctgcccttatttcccttatttaaatttttcctgccctcttgcattttgtatcaaaagcaacctaagtttaataacttcagcaaaggtaaacatttcttccttttgctttaagattcccagtgtatgtgtattcaatcagcaaatgtttgtgaagcgacctactgtacacttggcagcaggctgaaagacaaaaggccacctcctgatacatccttattgctgattttgttaatggtagaggtgacaaggtaggggatgcagaggagggatgtgcccttcctggtgatgttttgtttttttctttttttttttttgaaacaaagtttcgctcttgttgtccaggctggaatacaatggtgcaatctcggctcactgcaacccctgcctcctgagttcaagagattttcctgcctcagcctcccaaatagctgggattatagacgtgtgccaccatgtccagctaatgttttgtatttagtagagatgggatctcaccatgttggctaggctggtctcaaactactgacctcaggtgatctgcccgccttggcctcccaaagtgctgggattacaggcatgagccactgcacccagccctggtgatgctttttagtgcctctaattcttctgagccttttcctccacttcttagaaatatatagacctttggctgggtgtggtggctcatgcctgtaatcccaggactttgggaggccaaggtgggtggatcacctgaggccaatagttcaagaccagcctagccaacatgatgagaccccatcagtacttaaaaaaaaaaaaaaaaatgcaaaaattagccaagcatggtggcgcacagctgtagtcccagctaccagctactcgggaggctgaggcaggagaatagcttgaaacaggaggcggaggttgcagtgagccaagagcaagccactactccagcctgggtgacggagtgagactgtctcaaaaaaaaaaaaaaagaaaagaaaaaaagaaatatatagacctcctctttccacccccttcctctagtagcttgtcctttatcttcccttcctctatggaaaagcatattgtaaattaaagaagtcaaaaatgcaagagggtattctgtatttttacttttactatgatctccgttttcccagaaagtgtgtagaccctccttatcatccctcagctctattccttggcccattcctttctggaatttgtttctcaagccatcggcactgcatcccctccagtggtttgaaaccgggcaagactttgcattccaaagcaaaagtggaaatcagatgctcttagcaatccctgtgaatgccgggaaatcccgtggcattttcttacagaaacaggttatactgggtggatgggtttaaagcattattcacaggactaattgtatgacttggagcagcctcggtttcctcatctttcctcatttttcctcataaaatgacttctactcacttaaggcctgttccaggttcaaagatctaggattcacttatgttatcagttaaataggcttttgttgggctgatggtggaggctccccattgaaatattgtgtatctgggaaatatatgcagagctaaacaatcagattaacgagtgaacttttgatgtaccatctgtttattatggtggttctaccatgaaatctgttgcaaagataatactaacaaagcagaaaagtgcatcttaatatttacatggattacaataagaattggtaatgactcatgaactggtaatctcagcggctcccattctatccttctggttaatgctttacttgaagctgagttttgttccactaattatttcttcatacctgcatcctaggcagtaataaaggggtctctatataaggcaaagaatatggaattaagtaagcgaggtaccatatatgaataggtacaagaagagactgaaacatgttagaatttgtgttttgatacttgtcagggagaactcctgggatgatgttttacctaatacttaatgatatctgactgctctgctctgcagggagcacagccatgtggtgctcattggctgatgtttgttaggaagtgggccatctgtagccaggaaggcttgagataatcaggagggggaaagtgggaggagaatggattgtatggagctgtgaaatgccattgtggtgagtttcctttcattgtgtattgattgggttttctagaggacagctctggactgagtctttttccattttcactgttgctaggttgactgttaagtaatgcttttagacttcttggtgagacaactgagaacatcctggaactaccatactataaaaatgttaatgtgtacatatctatgtataacagtaactcccaaatctcagtttttattcagtcttttccttgaagcttaagaattgagtaagcagttgtttgctggatttcttttcttagtttcgtgttttttttttgttagagtctcactctgtcactcaggctggagtgcagtggcatgtgatttcaactcactgcaacaacccaggttcaagtgattctcctgcctcagcctcccaagtagctgggattacaggcatgtgccaccacgcccagctaatttttgtatttttagtagagacgaggtttcaccatgttggccagactggtctcgaactcctgacctcaagtgatccacctgccttggcctcccaaactgctggaattacaggcatgagccatcacaactggccttggatttctttacctggttggtgcctgaatcttaacctgtttcagcccaagtgcaccccttcccgcattcctagattgcttctcctgtgatagtgttctcagttgttacctgctatttccctagaaggacctttagtgtaattcagagttccttctccccatctctaccatcactaatccaatccaggcccttctcatccttcatttgagcctctgctgtaatctctcaattagttttcctgactccagtttcatcctctatttgacccactctccatctgccaccagaatgactaaggaagtaattcaacaaccatttacgagccaattactcttttcaggctgggataacacagccaacgaatcactgtttctgctctcgcaaaacttagtttctagtactgaaggccaataaagctgtgtacgcaaacataactaatgtgtttataaactgttgcaaaggaaacaaaccaggatttgaggtggaggatgaaagggaaggtatcctttgcgtagggttgatgaacaagggctgtccttgatgatgacatcgaagctgagttcgaaaaggtgcgaagaaactagaagaggaatgaagggagccaggggtgtccaaaggagagaatacagttatgggttcttagtttctgtttctggttgggccagtaaagccccttcatcatccctcttttctgcttatcactagagagagaaactaaaaaccatgatttcaggctgcaaaaagcctaaaacaaaacaaaagaaaacagaacaacaaaaacaacaaaaggcgggttgaacaagcaatccagacagaatgaacagtctgtgcaaagatgtgtaagagcttattggtttcaaagaactgaacactagaagagagtgattaatgcacagagcaattgaacaagtcatgggagatgggatcagaaaaatgggcaagaatcgtgttacagaggcccttgtggtctgcagcagagagtgcaggacctattttctaggggagaatagaccccactttcttgtaattgtggaaatgagatccctgttttcttgctggctgtcagttgaggactgtcgctaggttctaggggccacatgcattccttgagttctgtccccttccttcatcttaaaagcctgcaaggctggtcaagttcttctcacattgcatctctctaaccaacccctctaccttcctcttccacttttaaggactattttgagcccgctcaaaatatccaagtaatcctgatcaatcattaactttaatcacatctgcaaagatcgttttgtcatggaaggtaacatattcacagaatctgggaagtaggacatggacagctttgagagtggagtggatattattctgcctaccacaaaggtagagtcaaatgagaaaagtatctataggggtccaggtgcggtggtgcacacctgtaatcccagtgctttgggaggccgaggtgggcggatcacgagatcaggagttcaagaccagcctggccaacacagtgaaacctggtttctacgaaaaatacaaaaaattagccaggcatggtggtaggcgcctgtaatcccagctatttgggaggctgaggcaggagaattgcttgaacctgggaagcagaggttacagggaatggagatcgctccactgcaccccagcctgggggcaatggagtgagactccatctcaaaaaaataaataagtaaataaagagaaaagtatctttggggtggttgatgaccttgacaagagcttttttggacatatgatggcaaaggagagccacatcatggtcggtggagcaatgaaagcagaagttagaaagtagaaacaatgggcctggcatggtggctcatgcctcatgcctgtaatcccagaactttgggaggctgaggcgggtggatcatttgagtccaggagttcaagaccaacctgggcaacatggcaaaaccccatctctacaaaaaaaatccaaaacgttagctgggcatggtggtgtgtgcctgtagtcctagctactcaggaggctaaggtgggaggatcccttgagcccaggaggtagagtttgcagtgagcctcatcacaccattgcactccagcctggataacagagcgagaccctgttgcagaaagaaaaccataaagtagaaacaatgtagtgtgtagacaactctttagataacttggattatggctggaggggatgtggaatgaactgaagcatttttttaggcaaatacaaatgatgtttactgataagaataaaccaggcaaaagtagcatgatgatgatactcggagcatcaccaagatgaggccctggaatccttcatccagggaggatagatgcttcatccgtcagggaagggaggaaaccctgcaaggaagcactggaatctttcccaggacaagagtggatgaatccagagccagcagagagcttggcctttgatgggagggacatgcccccttgtgtatagaagggaagatggaggatttggatgctttgtgacattgtgatgggagataagtgaagtgccatctcatggcttttattttgtcaatgaagtatgaagcagggcatcatctaacagaactgtgaccataccaaccttgcttcaaactcctcaacggcactacctgcttacctctgtttttgtttcctggtgctgtctgcctagaacttgacactacctcctcacacattctgcctagccctctggacacaccacacctctttgcttttgatggtgtgtttgcttatggcctttaccagaatgccttgcctcttctcactttcccttttaccgtctcccatccccacctcccaatgcacactccttttccaggaaccagccttgaaacacaccctcaccctggctgtttataggggcagaggccctggtgctttcattgtgaaattcacagcacctaggacagtacctgcacacaggaagagctcagtatatgtttttcaatataataacttcattgcaggtaaattaattgattgagcatatatctcaaactatcaaaatagggtaggaaaaaaatgaactgtattaagcggaaaagaactgttgttatactctttgatgacttggtatgatttcattttgctcactctcaaccaccagctttcagtgggctcaagcattcaaaatgtcaactttacaaagtcatgaaatcaacctaagcatccatcagtggttgactggataaagaaaatgtggtgtatatatatgccatggaatactatacagccacagaggagaatggaattatgccttttgtagcaacatggatggagctggaggccattatcctaagtgaagtaactcagggacagaaaacaaaatactgcatgttctcacttatatgctggagctaaacagtgcatacataaagatggaaataatagacactggggactccagaaaaggggagagtggaaagtgggtaaggattaaaaatattacctactaggcgcaatgttcactattcgggtgatgggtacactggaagcccaaacctcatgattatgcaatacacctatgtaacaaactagcacgtgtacccttgaatctaaaataatagaatacaataaaataaaggaaaacaaaaaaacccaaaatagcaaataaaaaattccataaataattcatatgttaaaaaacacaacaaagtgtcagctttaaatctgtattattctgtaggctgtaaagtctgtgagagaaaagattatggttcagccctccttgtattgtcagtacttgacacaaaatataaagcctgtagaaagtattaaaatgtttagatgaatgatttcgtatgatttaaaaattactatctgtttctagaagctgcagtatctagcacatcttccccgcggggatgtccttctgttctgattggcctttagagaaagtagtctgataccaccctgatttttatctctttatccatttcagaggccttgggttattctgagcatgttgatttcaagtcctgtaaagctgagtgacttaacatatcgttcttcaacttggtgtttttaaagagccaaacatattcacacatgctacaaatgcatgctagctctgcatttggttacttgatgagttcaaaagaagctcaaatctcagcattaagcaccatactccctgttacaaggccgcacatgtacccccgaatctaaaaaaaaagtttaacattaacaataataaattacaaataaatatgcatcgttataagcaagatttgtagtgcagtaggtccttgaataatgccatttcattcaacattgttttattatagtgttgatgagaaaacaaaatcggttcccaaccagggccgctgtcagtgtggagtttgtacattctgcccgtgtctgcaagggtaacctctgggcactcaaatttcctcttacatctcaaagatgtgcatgtggattagtgggcatgtctacattgtccccatctgagtgagtgtgggtgagggtgggtgcaccctgagacgggatggcatcctgtccaggttgggtcccagctcagtactctgagctactgggataagatctggccaccctgaactggagtaattggcaacatcattatcttacttgttttattcttttgttttgaaatggagtctcactctattgctcgggctggggtacagtggtatggcctcggctccctgcagcctctactccctgggctcaagcaatcctcctgcctcagcctcctaagtagctgggaccacaggcatgcgccaccatgcccgtctaatttctgtacttttgtattttcagtagagatggggtttcaccatgttttccaggctggtctcgaactcctggactcaagtgatccacatacctcggcctcccaaagtgctgggattacaagcgtgagccaatgcgcctggcctattcatctttcttaaatgtatgcatagcccactttcacttcagtgttaatattagatgtgtcttggtctttatttagaaatctggttattttttgtgatcagaaatatgccgtaggaaacttattcttgtttatattaattagcctgtggtaaaattgatttcattatatgttgttttgcttaaagtcacagttttcaagaaactgttgaaaatgttaagtgagtacttaactgtattttgagtggaataatttgcaactgaaaaaagtttacaaaaataggattaatttctgcagaaaatgttcacagtaaaatgccaagggataaaaatggtattaaaaattatatacacagtatggtcttaattttaggagaaaattctatatctatgcaagcatatatagttataggtttgtgtacaaaaatggctgtaaagtaatacaccaaaatactaatagcagttttgcctgggtagtggaatttgggtaatttcagctttcttccttatacctttctttattttctaaattttataataaatattttctttttgaactcaggaaatctatggtatttatttttcaaggtaaatttttctttaagcatcagtggtaaaattacttttgtccccctccagtgttgaagagtgcaagaaattgggagtcctaggtttgaaatgtttttagctaagaggactagagaatggcagttaatgtacatcaatgataattgatccaggagacgctttggagttgacttaaaatgtaaaaatgtgttcagggttcaatatatctattttcaaggtgttattgatcagatctgtttggtttcatcacctctggcagatgttccagtggtttcttaggagagcctccctctaccctggtatgtgtgatcgtaagccagactttctgaatgcagcttaatgcccaagaccaaaatagactagtgagtcacttggacatattctgaatcaaagatttaaaaaccaaagcatgcaaataaatgctcctaatgccttagctcagagtaaacatcagttaattttaattttaaggctagccaaatggctattgcttaaggcggccagagtgatgttaatgtgaagagctggctccgtatgggcaagggctacatgttttggtgtgttatggtatttatggtatgctatttcattttaattaattttgtgtattctctatgatactaacacaatgttgggcatgtacaaagtgctgagtcaatgacagagaccagagcagaggagagtaatataaagtactgattgatgaggatgtcataggttggctgagtctgccctgcttcgtggcttttgtcttggtttaatcattaatagtatcctcttttactctcaaaagtctttcatttggatgattgttttatagggccactttttgactgaggtggctgagtaaaatcttctagattccatgcgttcatctctgcctgaacagcagttgtctgcctggcaaaaatgtaagagccacacccaaaagcacatgctttttaatgctccctctctccttcttaccctgcgtaatggctgcagttttgtactaagccttttcagatagattaaatggaactgttgaagaagccctagaggattaaagctctggacaagttgatctctttctatgaccacagctgttccagatggtggtaatacttctaggaccctgaatgctgcatttggggccaatgggatgaaatcccaagagcacattgaaactgacaagctgccttgacatttgctctttagctcctaagccatggattcacttcttctttatggcggtttgcacttctgtttcctttattccttcagggactcctgctccatccccttttttctttagaagaatgagaatttaaaaggcagcatgtctaattcactgaggattcagtgccccttaattgccttagaagcctgaaaagtcaggctctaggaataagctcagaggactcaaattgagacaaacatttgtattttgacaaaagctgtgcagtcttctgattcctgccctcaaagcagagtgtaataaatgagattgagaaaacacttgtattttctgaattagggtttaagttcctggaaacctcttgttcttgtttaatttaagattgaaatctgtgttttttttttttttttttttttgagacggagtctcactgtgtctcccaggttggagtgcggtggcgcgatctcggctcactgcaagctccgcctcccgggttcacgccattctcctgcctcagcctcccaagtagctgggactacaggcgcccgccaacacgcccggctaattttttgtatttttagtagaaacggggtttcaccgtgttagccaagatggtctcgatctcctgacctcgtgatccgcccgtctcggcctcccaaagtgctgggattacaggcgtgagccaccgcgcccggccctgtgtttgtttaaaaatgaaaatggttctaaacttttcttgggtcactgagccctctgagaaaatgatgactgaggattttctcctctcacgtgtgtacacacaaagaacattttatatataacttcagaagtcttatgttgcctattccactctggattgtaggttaatataggagatagttggttgcctttcccatatccatgctctgtagcctgcattccttcttcctaggagaaaccttattatctccaggtagctcaccctcctccatgggatggtgtgtttgagagggggccctggcctctggtcccaggggtggtggggatggaggagaatgattggtctaaaccaatcatgatggtcccctgtctcctttgctagagactggttcagccatgggtatgtgatacatttctcacaaataagaggagtgtaatcctgccgggtagctttgggacaaagtttcatcactcttaagatgcgaaccatgtagtagtatggatgaagcaatctcgaaaccctttttaggtgtataataaggttgagcaaatgagaaaaggcagaaatagccctatggagtggattggaattggcatattggtgtgaattgaatttatgatttctaaaatatgcaagtgaatgcatatatgtgtgtttatgtgcagatgtatgtatgtgtatatttataaatatgtgtgaagacatatatatgtatagtatacatacggtcatatatttcctagctctgcctcttaaaaggaccaagaagaaatgagatcccaataacaatgagaacacctgctacccagattctgacaccattcttcactaaaaaacccctcaaaaacaaaaccaaaaaaccaagctaccttgcagaaattccagggccggggcgtgaatcaaggtgatactggaatcgcagattgtgtttctcaggctagtctcctaactaagcctttaacaggccaatccagtcttcagttaagctggatgcttgtgaatgaggtggtatatgagaaaactcatggagtccctactcatacactcattgctgcacctcctttgacatatatcgatccctgggtctgaagcaatgttgtgtgggatactacactgatagattaggcattcttatgttctcaaatagtggcacttgcagagaccctaaaggcagagaaagcaaacccaaacctggagtacatgtcaatttatgtaagcatgaatttctatctcccctctcctttttggggtggaagtggtctgttatgatcagcctttccccaagggcctggctgatatctgtgaaggtgctatagagattggcatctccctctgccattggttggctggaccattcagcagtggtaatagctaggtcattgctaagagaaagcccacaataccgagcccacatacagcctttatcctgccacctgagccatctcatccatgggcccattgtgctagcactggttgtctgagaagaagactctggctgacatccacaggggagtcatgcattcaaccagccaccactggatcttctcattcacatggcttgagtgacagggcagattgtaccagagcctgctgctgctgagtcctctcctgctttggaccacatttctgctgtctgctaactgaatacagagcttgaaataaagaattgcatgcaagagacttatttgtcaatgtgatcccaaggagtaggagggacgaggggggatgaaatagggaaggaaggaaagccagtacagcggccatgctaggtacaactgatgttcaatcccatcagatcttctaggagactcatgaaatttatctcagcactgtaaggaactaatggggttatcgtctcctgtccatcattgttcattggtcacagctggtcccacatgttttagctcccaggttgtgcatgtcagctgtcccagaagctttcttcaggtgtcggagaagtctgagggcaggagtccagagatagaaggcatctggtacagccaaaaatgaggtgccatcaagttgcacctgtttggaagttggttggaacctctgctggattggaaggctgcatcggggactgaagtgggaggtgagaggagataaattaggagtgttacataaattgtgtcccatgcacacactacactccaaagggtctaatgaggaaaatgcaggctttgaacaagccacacctggctccactcttatctagttgtaatactttggtttatttacctgactattctaaagttcagtttctcgtctgcacaatgaggatatcaactcgttatgcaactgggagagttagcagatgtgacatctgttaagttcctgctttgggcctggtattgactatgcaaagcagcagatgcacagataactttctagtcttgtagatggaagggaagggaaggagatagtggatgagggacgggttcataggaagagggcattggacaaaaatgcaggaaaaagaactcttcataaacagagagtggtgtgcatgtgttacagggagagaggacaggtaaaggtgttaaaggtggcaagattagtatggtcaaagtagagtccagaccaagattgggtgtgttccaggaaatagcgggacttccatttgagtgccttatagttatttcttaggagtggacacagaagacagcacagctggggtaggcgcttgaacgccagtttgaatagtttgaattatacttggtaggcagcctagaaggagctatagacaacttctccaaagactggaaattcaaccaaagaggccagtttgctttctagtttccccattccctcagctcattcaggccacgcaggaagttaccattgcatatgtgtccttcttgtagcctctggggatatcactgtgtaacttactcattccagaagagacatatgggaagatgggggtgggcaggagtagggggctagctctcattcatgttttactttctttctttttttgagaccgagtttcactcttgttgcccaggctggggtgcagtggctcaatctcagctcattgcaacctctgcctcccaggttcaagtgattctcctggctcagcctcctgagtagctgggattgcaggcgactgccaccatgcccagctaattttttgtatttttagcagagatggggtttcatcatgttggtctcgaactcctgacctcaggtgatctacttgcctcggcctcccaaagtgcagggattacaggcatgagccacggtgcctggcctcatattttactttcaaggcgtagtgtatagtgccccgtgctaactaacgtatagtaagtactgagtaaatatttgaggagaggatgagtgaatgaaagtgctatgtatttatctcttccagttcttttcttggtggcactgttagcttatgtggctccttgggtaagacatttgcctgccttgtgccagagccagccgtgagctagcacaggggcgaacttctcttaggttctgaggttgaagactttggacaggttttgagcttagatgcatattgaatgtgtgtgtctccatttttctttctaggtctgatgtggctgtgtttcagcctgtgcttatacagtattcaattcactgaaaaataatgtggttgtgtaaacactcagaaggaagtgtggtgtgaccggtgatcacagcttctgccagaatatctagaacaggatgcattctgcgatgaaagagatgactacaatagctgtagctatttattttataaaaaaaaattcttagccctagttcatggcctacttcttccaagcagtacaggtcaagcatccctaatctgaaaagctccaaaatgtgaaactttttgagcaccaacatcatgccacaagtgaaaaatgccacactcgggtacttaacacaaagtttgcttcaggtgcaaaattatttaaaatattgtataaaattaccttcaagctatgtgtaaaggggtgtctgtgaaacataaataaactttatgtttagacttgggtttcatccccaaaatatctcagtgtgcatgtacaaatattccaaaattaaaaaaaaaattcaaaacacttctggtcccaagcatttcagataaagtatattcaatctgtattaaatgtaacaaaatttcagtaacatgacagaatctgagcaatgacttggaggcttatgtcactgattttgccttactgtgagaatatttggggagctgagcccaggaaatgtacttttccttttgttcttttttttttttttttgagatggagtctcactctgttgctcaggctggagtgcaatggtgcgatctcagctcactgcaacctctcctgggttcaagcgattctcctgcctccaagcaattctcctgcctcagcctcccgaatagttgggattgcaggcgcacaccaccgtgcctggctaatttttgtatctttagtactagagatgggatttcaccatgttggccaagctggtctcgaactcctgacctcaagtgatccacccggcttggcctcccaactctagctgcagagttacttaactcttggctctttcacagtataaagggatttggagaattaatctgatattcccaggttgaattttttttatttgttcataaaatttaagcaaaaagtattttttaaaatcttccagcaattcagggccttatgttctggagagccgagcattctaaagaacgtagcatcatttcctagaattttgcatcggtaccctgagctccttcatgttctttaactttcgttccccagcacatgaaacaccatggcagcaacccttattgcttgtggctacttctacgtccctcctttttttcacaggacattccgttcttctcaccagccctaacctgtttgccacttggcaagcacggggaacaggactctccacagtcttaccccggggactagtttcagcttttcagagagcaaagcttctggtccaacagtatttggaaattgagacaattgaggagaagtagtaatatgttcaactgcagagaatgtagcctttggcatacaaggaggaagctgtcttggcatctgtcattagagccactgggtattttggaaaaagtccatttcattcttcctctttttggatcctgaaacaagaagctatagtgccatcaggaatatagagattgggaagcatgggaatgattcaagtaaacttctgaagaaagcgtacacctccagggtagctaaacaagcagaatgcttgttggggaagcaaaatcatctgaaaacaacctgaatttggaggtaatagaaaaaaaaagttttttaaaaaattttatttaaaatggaaaaatttaatggtaggatgggaaagtagtacttctagcttggttttggattcagacctggatgggaatactaactgttagaacttgagaaaacaatgttagcatctaaaccttagtttagatgaaatgtgaaatgagagaataatagttcatttgtgcccttttgaaagatgtttaaattgtggtaaaacacaacaacatagaattatcgtcttaatcattatagtataattcagtggcattaagtacatccacattggtatgcatctgtccccagaactcttttttcattttataaaactgaaaatccacactcattaaagagtaactccccagttttttccccctcctccagcccctagtagccatcactttactttctgtctgtatgaatttgactactccaggtaccttgtttaagtggaatcatacagtatttgtcattttatgactggcttattttacttagcatagtgtctccaaggttcatccatgttgtagcatgtgtcagaattccctttcttcttaaggctgaataatcttccatcatctgcatgttgtctttatataccatattttgtgtatctatttatctgtcagtggacacttgggttgcttccaccttttggcaattgtgaataatactgctatgaacatgggtgtacagatatctccttgagacccgtgtgttagtttgctagggctgtcataacagagtccctagactgagtgacttaaataacagaaatttattttctcataattctgcaggctaggcatctgagatcaaggtgttattaggattaatatcttctgaggcctctccccttggcttataaatgactgtccctctctatatcttcacatgatctttcctgtgtgtgtgtctgtgtgtccatgtccaaatttcctcttcatataaggacaccattcatattagatgagaacccatcctaaataccatatcttaacttagttacctctttaaaaatgtatttccaaataaaatgctgttctgaagtactgggagttaagatttcataaattttgtgggaatacaatttggcccatgataccccactttcaattcttttggatatatccctagaagtggagttgctagattatatggtaatcctatttttaatttttttaaaggacatagttcatttttatagggtggctgtgagatttaaatgcccgtaaaatttctagtgtagggttggccccagaaaaagttgacttcaattagctgtataaactgtaaagttaactattctgatccctggatttttaggcaaagaaattgagtccacaaaagttaggcaacttatgtcttcaagtttctggttagcatcagattcagaaaaataacctaggttttggcaatgtcaggactgttgataccaccatgcaccatttcttttcagtccttcatagactgttcagttatttgctattaactattttctggcttttatggtatgtgatttattatttttttaaacttagttttctgaataggtactatattcacttggttcaaaaattgcaaaagtttataaaggtttacagtagaatgtctttctcttatgtttatccaccagcaacagtgtgccttccccataaccaactgatattaccagtttctaatgtagtcttccaaagatattttatgcatgtataagcaactccatttgtgtatttttttttttgccattttcttatacaaatggtaatttgtagtcttctgcatcttatttcacttaatgtattttggagatcgtaccacatcaatacataaaaaaaacttctacattcttgttttggctccatagcattccattgttgaatgccctgttcctcatttagccatctcctgttattaagacagttgttattacagacaatactgtgtttaaaaaacttgtacatacatcattttgcatgagtgggagatgttatatctttatatctttagtatatattcctagtggtagaattgctgggacaaaaggactatgcattcataagacagatttttgccaagcgttccttcaaaggactttaccaatttatattttcactatcatcttatggaacttttaatgacgaggagatggcagtagtttccaaatatattagaccaggccctaatttattaatctagtgatgactgtcttcatgagggcttggcaggagtcaaagcaaaaatcagaggacatctcccatagatcaggaacaacataaggatgtcttttcttgcaatctgtgttaaacattgtactgctagacaagaaaatgaaatcaaaaggatccacactggaaaagaagaagtaagatgatctctgtttgtagataacacaaacagatctctgtttgtagatagaaaattctaaggaacccactaagaaaactattagcacttacaagcaagttcagcaagggtgcaggatacaagattaacatacaaaaatcaattgtatttttatacactagctatgatcaatttgtaaataaaatatggtgaaataatttcctttataatatcctcaaaaagaataaaataccttggaataaatttaacgaaagaaatgcaaatcttatactctgaaagctacactgttgaaagattattaaagaagatctaaataaatgcaaaggcgtaccatgttcatgagtcaaaagacttaatattgttaagatggcagtagtttccaaattgatctgaagattaaatgcaattctcatgagaatttcagctgacttctttgcagaaattgataggctaatcctgaaattcataagataatttaaaggcctcagaatagccaaaacaaccttggaaaagaatgaactcggaggaatcacacttcctgatttcaaaacttactgaaagctacagtaatcaagacagcgtgatgctggattaaggatagacacagacaaatggaatagaatcgaaagtccataaataaatccttgcatttacaatcagttgatttttgacaagagtgccaagacaattcagggggaaaggagtagtcttttcaacaaatgttgcttggactgctggatatacatatgtaaaagaatgaattttgacccttacctcccaccatatacaaaaactacaattaaccaaatacttaaatataagagctaaacatgtaatactcttagaagaaaacataggtgtaagttgtcataaccttggatttgtcaacgatttcttagatataatagcaaaaccgtaagcacctatgaaaagataggtaagttagatttcatcaaagttaaaaatttttctgtggcaaagacacaatcaggaaagtgaaaaggcaattgacagaatgggagaaaatatttataaattatgtatctgataaaggacctgtatgtagaccatgtaaagaacctttcatttaatactgaaaagataactaaaaaaatgagtgaaggatttgaacagacattttaccaaagaagatctataaatggccaataaatacgtaaaattatgttcagcatcactgattatcagggaaatgcaaatcaaaaccccagtgagatctacttcacatctaggatgacaattgtaacaaaaacagaaaataacaagtgtaggtgaggatgtggagaaattggaaccctttacattgctgatgggaacgtaacatggtgtagctgctttgagaaacaggttggcaggttcaggaaaggttaaatatagagttactgttggacctagcaatttcactcataggtatatactcaagagaattaaaaacgtatgctcactcaaaaaacttgtacatgaatgtacttagcagcattatttataatagccaaaaagtggaaacaatacatatctgatgaatgaataaataaaaggtggcacaggtattctatacaatggaatattttcagcaataggaaggaagaattactgatacaagctacaacacagatgaactttgaaaatattttgcaaagtgaaaggagccagtcacaaaagtgcacatattgtataatttcattatatgaaatatctagaataggcaaatctgtagagacagaaagtaggctagtagttgccaggggctagagggaagggtagtgttgaaggaaaagagggagtgactgataatgggtatggtgttttttatgtgggtgataaaaatgttctaaaatggattgtgatgatggttgcacagctctgaatattctaaaagccattgaattgtacaattaaaataggtgaaatacatgttaaataagtgaataggtaaattatatctcaataaaggtattttaataagagtcagagtgcaaaggtaatgtcatggaccaactctaaaattaacaattcaaactcttcagtagcaaacattctaaaatctctagaaaagtatcccatactcacatctcatactcacatgtgtccactgagactcgtgggtagttcttgagatgggaaccacttctgagtcattttttttttcaggttttaggatgagcaactttggaacggaggaggcctttagaagaaagaaggaagttttagatcatgcctgcaattcagccttgcagagttgtttgcctgtttgaattttctcttatctctatggaacattgactacttcctcagaagcttatacactgttagagtactgggtaaaatttcatttgaaactacgggaactcctttgctgacctattgtggctgttcctaatgtttcttggcttcatgctgcttaggaccccatgggaaatcttggcagaacaccctgttatacatctatactgagtgcctctcacagcttcccttcacatcagatttttctgtttgtcacccgcttttgccccttttccttcttgtcttaaagagagacatccttcactcctgtctctgaggctacctgtctcctgtgttcttgatcccacgttgtcccttgggacactgcttcatcatttctgtgtacctctctggcctcttttgaccctttccctcatgggctttttttcttggcttgacagttgctcaaatttcccatcattttttaagaaagtagtaacaaatgtacaaaaagtcccaagcatcaaaactttccttagatgtttatgtctttctcaatagactacaatctttttattttctcacagtcaacttttttttgaaaagtctgtgtattttcctatttccatttatgtaaactttgaatgaagagaccagagttacaaagcaaagagccttgtgctaaaattaagtctagaacatatcatacttggaagcattctgcatgtgaaggagaagtggggtggccacaaggaggagaaggcattttctaaattgtttttccacgttgtggtacttgaagcccaacgactgtaattagactcgtattctggctacagggctggatgcagtgagagtgttatttggtgtcccactttgtttgtttatattttaggcattggagaatggaccagtttcttgggggagaaagtaccattcttgagattaagagatggaagttctccctgtacagaaaatgccctgagagagtcatcaagatgtatttggttaagtgtgttcatttcactttgaatgttaaggtttctggcatgaagccagatttcagaatctcagtgatcttgagtgtttagtctagtctgagactgatgagtgttctaccaggaagtgagaagcatcaggttgagaatatcattgggataaggtgagcagggaatccattaagggactaagagccctttactttgatattgagaggggacactgccacacatgatacaaacagcactgatcttgctcagcatctgcaaataaggatcgcagacacaacttttcaaatagtcacttcagccttacccttctgctaaagtaatttatgtcaagtagggaataggcttttcaatgtcatccaaaccccctgcttagggaaggggcattcgtttgtaaacacactacagagctattgaagaatacaaaacttggtgaccttatctgtaaagctggtgtggtacccttctcaaacaccagagcaccgtttagtgagaaaatcagctagtcgattgcccaaacgttttccattttagcatcagaggaaccaaagtccaggaaggtgaaaatatgttgggcaaaggtcgtggcaatttagttttttgattgagtctagatctccctggatagacctgggtcgtgtcaaaacagtttctggtaaacagttttataacctgcctctgtgatccagaagagcctggacatgtgagtagaaagcctgtacagtggatttaatcctggactttttcctttggataccagaatttatatatagccctgacatagttcagcaataatccttacacgagctagtggaaacagacttgtgatgaagagtaatttcagctgaaggactaaatacaattatatgggaaagccgactgcttacatctgtacaagctctgtgtatgtggacaaggtcctcgaaacagaggaagtaataccccatgcagctgtagtgatcattaaattaagcaattcgtgtgaaatgctgagaactgtgccttgcatgtaacacatacgcaataaattctaggtgctattattattctcatgagcaaccacttgttaataagaaggtacctgccagaaacggcagtgtagctgatgggtaacttacagcgttcatttatcccagacatatttattgagcatcacagcctatattgatttgctcctttaatgccaccaaggtagatattggttttcccattttaagggtgaggcttacattaataacatcccaagttttcactgctaatgacgggcttggtcctttcccactaggtctctttttcacagggtcttgttgtgttgttttccaatttactacatataactttgttggagactttaaaatcatctgactttgtatagatatgagtgggtacttccttcagtctttaattctgcttcccaataatgaagacttgtgagaatttccatcaataatatttacttaaaatcaatccaataaaaacctacaacttaaagaaaatcttatgaaattactgtatgcaggaaatattacaaattacctcctcatatttttgattagccattaaaatcagtttgggaattaaagagcttctgtatagcaaaagaaactaacactagagtaaacagacaacctacagaatgggaggaaatattctcaaacaatgcatccaacaaaggtttaatatctaaaatctataagaaacttaattcaacaagcaaaaaacaaataacctcattaaaaagtgggcaaaagacatgaacagacacttctcaaaagaagacatacaaaaaaatgctccacatcactaatcatcagagaaatgcaaatcaataccacaatgagacagtgagaatggttattattaaaaagtcaaaaaatgagatgctggtgaggctgtagagaagaagaaatgcttatacattattagtgggaacgtaaattagttcagccactctggagagcagtttgagaatgtccccaagaacttaaaacagagctaccatttgacctagcaatcccattgctgggtatatatccaaaagaaaaaaattgttctaccaaaaagacacatgcccacatatgttccttgcagcactattcacagtagtaaagacatggactcaacctaaatgcccatcagtaatagactggataaagaaaatgtggtacatatacaccgtgaaatactattcagctataaaaaagaacaaaagcatgttctttgcaggaacatggaggcaagcaagtcagtgcaggaacagaaaagcgagtactgcatgctctcacttagaagtgggagctaaacacttatgtccacttcggtactcgtggacataaagatggcaacaatagaccctggagactagtagaagcttgaaggagggaggggagaaagggttgcataactaactgttggatactgtattcactacctgggtgatgagatcagtccaaacctcagcatcataaaatatacccatgtaacaaacctgcacatgtacctcctgaatctaaaataaaaactgcagttatagaaataaaataaggctgagtgtggtggctcatgcctgtaatcccagcactttgggaggctgaggtgggtggatcacctgaggtcaggagttcgagaccagcctgaccaatatggtgaaaccccgtctctagtaaaaatacaaaattagccaggtatggtggtgcatgcctgtaatcccagctactcaggaggctgaggcaggagaatcacttgaacctgggagatggaggttgcagtgagctgagattgcgccattgcactccggcctgggcaacaagagtgaaactctgtctcaaaaaaaaaaaaaaaaaaaggaaaaaaggaaaaataaaataagtttgggaacattgcataggttacagtgtatatgagactacatggaacatatttactctaatacgtttcacccacatttctgtgatcacataggtggaacattgttctggtacaatagagaatttatatactttttcttgtgctcagtcttcgcaattaactgatttagatatttcaaggtgactgcctggaacaatttccagacttattacctaagactacagaactccacttcttttgacaccctgagttatggcattgcctgaagcaatagttgttaattacggtaatgattatttcttcaggagttaaaaagttagagtttaaatctttctataggactgtggaattttcactttaagggttacgtgaggatctgaactagttaatattgaaatgagtacacttgcatgaaccaaactacagtactttgaaaataagttgttagtttttgtagattagcgttctctttttagaaaatctcagatttaaattttttgattttcttgaagcaatttctttgtctttgctttttaattgggcatcacgaacccttagccagaagtgtcaccagtgggaaatgcgctaagccaggaaagtatgtagccgaacaaaaggcaaaggctactgtgttcttttgctaggctatggtttgcaaaacatgactctcacaaacgtccagcttctctggaaagaaaggtaactagacattgcagaaacagccatggggcaaaggattaaactgaggttttccaggttgcaggatttgagttacagggtaaagaatcttgccatatattttctattattttggccgcggtttctttaccctcttgtttcttgttggtagggaacatgaagagtttcagaattcatgaggaatttcaggcctggggaaagagctgcatttcttccttatgctttttcctccaagatggcgttgagttagaaagacctggaagggggtcagcctctcctccttccttgctccactgaagagcaggaggggactcctctgctaatatccattctttatagtttgcagttaatttctcaactttggttgttttgccttcttatattgtcaaatggagactctgtagatgtttcttgagtccagggattagccagttctttgtttctgtcgccactagcaatgcaggatcacaagatgcttctgaaggccaaatgctacaggagttaagaaggcaagagagtgaaagtggggtagggaaaggaagagaagagcatgggaaaagcaagaaatacatttgttagagagtgtggcagtgtgggtgtggcaggaaggatgctgcattatttcaataaatgttggaagaaaatttgacaaaattcattgtccatttctgataacagcatattatttaataattttctgtagctgctgtaacaaattaccacaaacttggtggtttaaaacccctgaattttttttttttaagttttgttttacgttcaggggtacatgtgcaggtttgttatataggtagacttgtgtcatggggatttgttgtacagattatttcattacccaagtattaagcctagtacccattagttatttttcctgatcctctccctccccctccttccaccctctgataggccccagtgtgtgttgttccctcatgtgtccgtgtgttctcatcatttagttctcatttatataagtgagaacatgagataatctggttttctctttctgtattagtttgctaaagataatatcctccagctccacccatattcctgcaaaggatgtgatctcgttctttttttatggctgcatagtacttcgtggtgtatatgtaccacattgtcttttttccttccttccttccttccttcctttcttccttccctccttccttcttttttttgacggagtctcactctatcgcccaggctggagtgcaatggcaccatcttggctcactgcaacctctgtctccagggttcaagcaattctcctgcctcagcctcctgagtagctgggattacaggcacgtgccaccacgcccggctaatttttgtatttttagtagagacgtggtttcaccatgttggccaggctggtcttgaactcctgacctcaactattctgcccgccttggcttcccaaagtgctgggattacaggtgtgagccactgtgcccggcccacattttcttatccagtctatcattgatgggcatttggattgattccacgtctctgctattgtgaatagtgctgcagtgaacatatatgtgtatgtgtctttatggtagaatgatttctattcctctggatatagacccagtaatggcattgctgggtcaaatggtagttctgtttttagctctttgaggaatagccacactgctttccacaatagttgaactgagttacactcccaccaacaatgtataagcattcctttttctctgcaacctcgctggcatctgttattattattattattattattattcacttttgaataatagactttcagactggtctgagatgttatttcaccgtggttttgatttgattcagactggtctgagatgttatttcaccgtggttttgatttgattcggactggtctgagatgttatttcactgtggttttaatgatcagtgatgagctttttttcacatgcttgttagccacatgtatatcttcttttgaaaagtgtctgtttgtgtcctttgcccactttttaatggggctgtttgcttttttcttgtaaatgtgtttaagttccttatagatgctggatatgagacctctgtcagatgcatagtttgcaaaaattttttcccgttctgtaggttgtctgtttattcataatttctttagctgtgcagatgctctttagtttaattagatcctgtttgtcaatttttgcttttattgcagttgcttttggcatcttcattatgaaatctttgcccattcctatggctgagtggtagtgcctaggttgtcttccagggtttttatagttttgggttttacatttaaatctttaatccctctggagttggttttcgtatatggtataaggaagggatccagtttcaaccttctgcatatagctagctagttattccggcaccttttattggatagggagtcctttccccagtgtttgtttttgtccactttgtcgaagatcagatggttgtaggtgtgcagccttatttctgggctctgtattctgtcccgttaaaacaccagaaattttttctctgacatctggaggccagaagtctacagtgaaggtattggcatgtcaggctccctccagaggctctgggagaggatccatgcctgtggtggctgctggcctttggcattccttacattgcagctgcatcaccaaagtctctgactcagccttcgcctctccttctcctctctgggtgtgtctactctccctctgcccctctgtgtaaggacacttctgattgcatttaagtcccacctggataatttaggctcatcttctcatctcaaaagccttaatttaatcacatctgcaaaaaattatcatgataacattcataggttgcatggattaggatatgggcatgaacttgggaaccatcctcagcctagcccactcagtaaaatgaaaagagtgatatacctcctcaacatgagaaaaatcattcagttggtctattcagctgaatccaaagccagcatcatttttttttaattgtgaaaagcaagaaagaattctcttaaagtgaggatcaaatgaagatgtctacatgaatatttcatatatgttttggacatgtcagccaatgaacttatacaaaagaataagaggcttaaatattaaaaagttgtgtacaattcatttggaaacaagtagacagattaataggtgatattggaagaactatctagccattggggaagcggaaagaatgtttttaccttatgaaaatgcagagaacataaaagaatgtaaaaatttaaaattttatataaccaaaaaggaaaaaaaacagtgtatgtgtttgtgtgtgtgtgtgtgtgtgttgcaacactaactacaaaaggggcaatgccttcttttacaaagaaaacaataataataacctgttataaaaacgagcagatgacttgaacagggagttcacagaaaaatgaatacagatgacagtggatatataaaaaatactcagctgcagctgggcgtggtgtctcacgcctgtaatcccagcactttgggaggctgaggcaggcagatcacctgaggtcaggagtttgagatcagcctggccagcatggcgaaaccccgtctctactaaaaatacaaaaataagctgggcatggtggtgtacgtctatagtcccagctacttgggaggctgagaaaggagaatttcttgaacccgggagacagaggttgcaatgagctgagatcgtgccattgcagtccagcctgggggacagagtgaaactccatctcaagaaaaaagaaaaaaaaaaatatatgtatactcagcttcattaaatatttttaaaatgtgattcaaaacaatgagacaccccttgtacccttgtacccatcaaattgacagagatgaaaatgttaatttgctgagggattatttatatttattcatttttccttttttcattaagagtttaagttagcttgctaggttgcataaaattaagcaatttagcataaattaaaagtaagtgaggccacctgcaaagtagtcttgccaaacaatctgatcaagttgaatctgatcaatttctaaccaacagagggatgtgtgagtcaataacaagggataagagcagcagaatccagtggaaaaaactacaggacacatggcctgcatttcttcaacaaaataattgcatgaagttgcaggaggagaggaaagggagaggcaaaaagaaatggagggaggtcaggtgcagtggctcacgcctgtaatcccagcatgttgggaggccaaggcgggcagatcacctgaggccgagagtttgtgaccagcctggccaacacggtaaaacctcatctctactaaaaatacaaaaattagctgggcatggtggcacatgcctgtaatctcagctacttgggaggctggggcatgaaaatcgcttgtacccaggaggcagaggttgctgtgagccaaggtcgtgccactgcactccagcctgggtgacaaagtgagactctgtctttaaaaaaaaaaagaaaggaaaaaacaaaatgaatggagagcccctggattaaaagggaaataagaccctgtactgatagcattctaggggaggagttgcagatgaagaacgttcctttgtttctttattacccccttagtcttcaagcagctggttgaattaaagttactatcttggagtttcctttggttaaaagggaggtgatcagagtgctattaaaattgtgggccgggcgtggtggctcatgcctgtaatcccagcactttgggaggctggggcgggtggatcacctgaggtcaggaattcgagaccagcctggccaacatggcgaaaccctgtttctactaaaaatacaaaattagccgggcatggtggcgcacttctgtaatcccagctactcgggaggctgagataggagcatcgcttgaacctgggaggtggaggttgccgtgagccgagatcgcgacattgcactccagcctgggcaacaagagcgaaactctgtctagaaaaaaaaccaaaaaccaaaaaacaaaacaaaacaaaaacccaaaattgtggtcttggaccagaggaaaaaaagaatccattacttccacataaaaaaaaaaaaaaaaacaacaaattcacccctcttattcgctatgccactcttttaactattaaaacagaattttctgtgattctgttactatttaagaacatctttatatattggtaaatttcgttttattttttcttttatttattttttttttgagctggagtctcgctcttgtcgcccaagctggagtgcagtggcgagacttcggctcactgcctccaccttccaggttcaagtgattcccctgcctcagcctcccaagtagctgggactacaggcgcccaccaacacgcccagctaattgttgtatttttaatagagacagggtttcaccatgttggccagggtggtctcaaactccagacctcaggtgatccactcgcctcagcctcccaaagtgctggaattacaggcttgagctactgcgcctggctattttggtaaatttcaaacatattcaaaagtggactgtattataactgccaggtatctagcactcagctttgacaatgaccagctcatggccaatcctattttatctgtatctctatcccccactctgcctttttttttgaagcaaattctagaataatatcatttcactcgtaaacatttcagtattatctctaaaaaaaaaatacttattttttaaaacctaaccaaaacccagtgtgtattttgaaaagctcgagcacgccactaaatttctttgcaacccattgccattttttattttaaagtgatgtttttaacacccttatgactacatttccttgcgatcaatgctaatgagtgaagcagcccataaatgaggaaggagatgaaccgagacagtaggagttccctactgcctgcctcctgccttttccctgggcctagaacataactcagggcattggctgtgatttgcttttaggttcttttaagaacatcttagtcaacaccaaattgttaacatgacataaaaggtctactaggacttttttttttttagctttaatcacatgaagctgtaataaaacccatttgagcacttttattctcttaaaatggggccatttcccaattagcggatggacaggctggctcattcttctttgacaggaacgtaattctttgtgtccttcaccgattcttcgaaatgttcttagcttggctggctgccttcccttctttttttttttttttgagagggagtcttgctctgtctcccaggctggagtgcagtggtgcgatctcggctcactgcaacctctgcctcccgggttccagcgattctcccgcctcagcctccagagtagctgggattacaagcgtgtgccccacacccggctaattttttgtacttttagtagagatggggttccagcgattctcccgcctcagcctccggagtagctgggattacaggcgtgtgccccacgcccggctaattttttgtatttttagtagagatggggtttcaccacgttggccaggctggtctcgaactcctgacctaaagtgatccgcccaccttggcctcccaaagtgctgggattacaggcataaggcaccgcacctggccaccttctttcattcttcttgtttccctgtctgtctcaggcaactttctacctctctgtttgtcattcccagatctactcatttcctcctgtccctctcttaagctccatttgcctgcttgaattctgccatgcgtcccgtccctgcagcatcttatacttaatacatctgacttggaactcatgatctgccctttccccactggccacccccactgacctgactttcctctttcacttaacttcatttgggggtggaaaagccagatgacgagtatcatttttattaccactactattactagtagcaatacttctactattactattactacttccagtactactactatgcttctgttcctttgttcctcttatgcagtaagtgaccagagcctatagattttgcctctgcaaaattcaagcagcttatttgtgagccagattgctgtggtctctacctcttatttttgggtctagtgcttaaactctgtacataggtaagaagacatgggccctgacttcaaagggcttgcatttttagtggaagacatggatgaacagatgggttcacttaatcagcataggaaggttcagggtactgtggcaacacagaggaaaggtatttattgcattggggactttcatggaagacttcctggagaaaaacatacttgagctgagtgtcgcagttgactggggaaaacaggtaataacaacattctgaggaaaataagagcaaagacctggaggcataaaacatcaaggcatgagagtatgtgggtttatgcatgagtgtgtgtgtagcacagtttcaaaacatcctgatattattagatcagttcatcttgttacatctttttttttttctgaagcatggatgtggcatgatgttcctctactgaaaaacatacatgacttctctttttacatctgaaatttaaaatatatttgttacagtattttgatctctgactccaacttcctcctccaggtttctctctccaccacttttcagtttgtccagagtagaaaactcagaattctttgaatataccacagtgcttctccttacaaagatatttcatcctcattttactttgaatccccttattgtctctccaagtcttgattgtcaaaatcccacccatggtctttttaaactttgattttggaaatatttaaatatataaagaagacatacagtataacaaaccctcaggtacccttaaatcctaccaaaatcaaagggccacttcaaataccacttcgtatgtgagaccatttctcagtgttgcttgtcttgcttcttctctcctgctttcagggtgcaatgcttgtattgcacatcacacatacccgctgttattatggagttgggttttcatatctcctgatgcttcgatggcagaattgcatcttaataagttttgacccttgcaatgtgtaccctggggaatgattgacaatttcagctcaaagatagagataacacagtgaggagctagcttggaatttaattcttactaatcagaaagaactggtgggttgtgggggatgtgacaagagccttggaggaaagtgacgttggcaacataaagtgagaaatggtaaaacaagacaaacaaacaaacaaacaaacacaaaacaactttacatagacatgtggtagacaagggctacttaactgtggctgatttctcagacacttgtgaaacttaaaaaaatatatggatcctgaagcctcactctatcaacttagctggtaactactgtccccagtagctgagagacctggacaaaagggcatcagcaggggacccacctgcatgggtccttttggggcagtttcacccatagggataggattgcaagtgtggcttcagtgacacaactacaatgtgagattttaagactttttagcacttagagactctgtatggcacccagcacgcctggaagccacacacacacacctggaagccacacacacacacacacacacacacacacacacacgtgcacgcagagagagagagaagggaccactgagccaatgtctttattgggtacagggcgttatccagtttcctgcagggagctttaattgctgggtttaaagcaagcaggcactagttctaggaggtcacagcgtgactgagaggtggtcaccttacgtttgtgggcaaatgtctgcatggtctgtttaaagggagtggcaggaaagtagggaggccagcctgctaggcaggagagatgtctctaagtttcatgtctggccactggtttggagccaatctggtggagtgtggtattagacaccgtgttaagagtgactgagccctgcttctgatgtgagatagtttaacttaggtttaaaaatggatactgaggcaatgtaaaattataagcactcactacactcagtcccagaaatcctgagtctatagacctggagaagttcccatagtcagtgggcacaaagagaggtagattcaagattgatgagatgtttgaaaaatgtaattctagtgtaaataacacgaaagagggagaatggagcacggaatttgaagaaataagatgccatccagggaacattctgcttaactcatattttaaaaatgtaagcgtaaacatggaagggacaaaaggaagtatttattgagcacctatattatgctacaccctgctaggcttcttcacacacactgtgtcaatcgagtctcttaatgacctgcggagattgtacatcatctccagtttgcaggtgtggaaactcagtttaagataagaaactttctcaacattacgtcactaagtgggacagctgggatttgaaatgattcttattgatgcagaggtttgtgcaatttccattccattcttggttgttcattttgtttgtttgttttttgaagagctctgtacaaatgttcaaaacagttgagaaaagaataacaaacattcagtcaacaaatatttatgatgtgcaggtgctgggcaaaatcattggccatcatggaacttatattctagtggagaaaggtagataaacaagtaataaataaatgcagaagtaaataaataaatacaaaaataaaataattctagattgtgagaaaaggtttgcgggaaatgagtggaagatggtcgtggagatctattgtagagagagtggacatttttcaactaaaatatcaaagtttcagggaagctgctttgagctcatattgtgttgcaggctgagtgtaaggtgccagaatgtgaaagcaggaatgtgtggatagtaatccttagattgtgttcaggaagctctgggaaggttctatgagggaggttttgaatttggaaggttgagttcttgtctgcaagacagctagagccctccaggtagaaggaacagtatgagcaaaggtaaggtcttaggagattcattctgactctgaaatcaaactgactgcaggttttaaaatgagcttttcagctgggcacagtggctcacacctgtaatcccagtaacagcactttgggaggctaaggcgggcggataacctgaggtcagaagtttgagattagcctggtcaacatggcgaaaccccatctctactaaaaatacaaaaattaggcgggtggggtggcacgtgcctgtattcccagtcgcagctactcgggaggctgagggccatgagaattgcttgaacgtgggaagcagaggtttcggtgagcctagataggaccactgcactccagcctgggtgacaaagtgagactctgtctcaaaaaaaaaaaaaaaaaaaaaaaaaaaggccggccatggtggctcacgcctataatcccagcactttgggaggctgaggcaggtggatcacgaggtcaggagttcaagaccagcctgaccaacatggtgaaaccccatctgtactaaaaaatacaacaattagttgggcgtgatggcgggcacctgtaatcccagctactcaggaggctgaggcaggagaatcacacaaagccgggaggcggaggttgcagtgagctgacattgtgccactgtactccaggctgggtgacagagcaagattccatctcaaaaaaaaaagaaaaaaaaaaagaggttttcagcttttcttctctaaactttctgtaattccagagagatttgtcttcagtgtttggaatctcagtggtatataagagccagtggttttggaagattggaggatggcagagtccctgttcacttttacattgctgttgcaaagccagctttcttcctgcatgcctcttcccctgccctgcttcgttcgttgctttgcatatgatgattgcaatttaataacactgaatgatacttcactgctggttttattgccaactacccttggaacgtaagcctagatgcaagtagtaaggagagggcagccaaggcctctagattgccagttacttggctggaaatcccattcatattgggaaacagatttttaaaataaatttggcactggaaacactgccatccttttgtgaagctgtgtcaataatcataaactctcatagtcgtgcccccaaccctcggccaagctaacaaatatttaggcatcagcatatcttcacgatgccaccttctgttgaccgcgtgggcttctcatgctgtttgggttggcagtggaacataatcttctgttttatgtaatgaggaacatcagaggagtgctttgtgcttaccctctcagagtgtgtgcaagacctctcgtgtaccccatcattttcggtgcagtcaaagctagcgaacatttctgtggcctggtaaatattttctaactattggcaaggctttttaaatttttttttccagtgccattttgctccaggccaggattataatgacccagctttgctttggtttcagatgaattttgcaaatatatgtgtgtggtgggattacactattttcagagaacacagtcatgcgggtaacagggtctgatgcaatatagtgctgcatatgcccaatcaggccgacgaggcttaccctttgcagactgtgccaataagcagtcgaggcttgttgcgatctgcagaaatctacagaattctctgtttccgagaaggcttgttgctagcatatgacatcatagaaagcctttttttttttctgacattttttctgctttgctttagaatatcaaaggcaaagactgttgaacatagttggccacttagctttattattcatagtgctccctcccatgtttttttttttttttttttaacagtgttcaatgttagcgtcaggtgttggctgccttcctgggggaacagattgctgtgaagtaaacacagctggaaactgaccacatattgtttttctttcttttaagaaatcaaagaggcatttatagaaaagctgcagaacatggtactgtccagatttatagatttattcctccaagtctggttaatgattaatgtcacgcctgggtgtccacatagacccacttcccttctcccttcctgaagctgcaatttcctcggaacaatgagcttgcagaggtttgctgcaatccgaacttgaggagggggtggagtctgttcagttctgtttctccttgccgaagtgtggtctttggagctaagtgaagaatgacttctgttaggttttcctctgctggtcttccttgcagcctcgaaaacctcaccagagtcgcctctgctggtctcttactgtgctgctctgtcagagatgggcaagtaagcgaactgcagagtgttgctgtgtgtgcttgtgatttgtattttatttgatgtaaacgtgaaggcagagtattttctaacactgtaattcaactaggttttgtgtctcctggatctatttttttttcttgttgttctgaggagctgatatacttggaaatattaggtttaagatatgcagatgtccaacttatatacatagtcaagggtttagagtctggagacaggaggctggcaatttcaactaggaggcagtaaattcagggtaagaatgatgttgatgtggggggctgtgggggtggctgggtgtaacagtgatctggggagagaatcaaaggccttctcctcccacttggaagactttactattattttggtcttttattcctttggtctctgtgctaaaaactttctctcttttttactgtttctttgtatagatgttttggtgatttaagttatggtgtaataattaattgctgttaagaattgctactaattacttgctatattaaagttttccaaaggggttttctcaataaatagctatttctctttacatctatcttgtaagaactgagttagaggtaaagaagagaaagatgtaggaatttaagagtaacttctgcttttggtttgcttaaatgacaactggagaccagttttcataggcaaaatatatgttactttagtttttgttttcgttgagagaactgtagggtcgccttttgggattacctgaattatctgtcacctgcactggaatttgtatgtagttatctgtatagttatctaaacaagttgaatccgtcattcattcctcactgaagaatctcatcgaaagtaacattccctgtctgtttggctgaggtgcatggatgggaattgttggaattaggccatatatctatttggattctcataactgggtccagcacctagcatagttcctggtacataggaaagctctatgcgatgtcaataactgactaatttagtaacatccttaacagctgtttgagttccaagagcaggaaagtgaatggtgagttttgaaccttataaaatacataagtaaacccaaatgaggagagaattgagaaagcctcttattctgaaggtggtcctaaaaggctttctctaggctgattactgcgaagcatattttttcctggctatatacaacttggcagaattgatctgattttggattctgaaggaattgaaaaatttcattatacattatagtgggctataatgatgtggccagttctcttcattaattttttaaatgactttaaaaaaaatgagacagtactgattgtttccctaaatgaatctaattaacagctacttaaggtatcttaatgttttttcatatatgttatctgctttgattctcatatcagtccagtgaggtgagtatggttgttacttcctcattttacaattgagaaaactgagagtcagatgaaaagtgattctagaagttgcgtgatgcgtggaagaaccagatgtcagctgggtattttaaaactcaaaatcccgggtacgtctcacctgccccctctccagtcatctctaaacgtcttctattgcaggatagtagaaagaactcccacctgggtgtcaggagacctggattctgattctgactgggtcattgctgacctctgtgatgtggagcaagtcactgaagtctttggatgttatttttctgcaaggaggttattttaattggtttaagtttctttgcagcttcaggatctatccagggccatatccagggcttgtgttatctctgagtgctcatctgcaatgtagagaagaggtgggaaaggaggtaggattctttttttttctttttttttttgagacagagtcttgcactgtcgcccaggctggagtgcagtggtgtgatctcagctcactgcaagctccgcctcccaggttcacgccattctcctgcctcagcctcccctgtagctgggactacaggtgcctgccaccatgcccggctaatttattgtatttttagtagagacaggatttcaccgtgtcggccaggatggtctccatctcctgacctcgtgattcgcccgtctcggcctcccaaagtgctgggactacaggcatgagccaccgcgcctgggcagaaggtagcattctttccagccattctatgcagctctcccttggtttcccctgccaagtgcaaagagacacaggatctccatgcatgaggaaaaccccaggcccttgtttgctctgttctgcttcctgagctggcatttctcagtctgttcttttttactcatcaacaaaagtattcgagccaaattctcttgtaatttcagcccaggtgtgatcaacatcaagttacctttccatttggcccaagaagaagttataacttccttgcataagctcatctgttatcttaatcctttctggaacagggaaaatgtaaataagtattactctatccctctcttaagtttttcaaattacagcaggtggttgggaaaaggggagggcagaacagtggaaaagcattttttattctacttccattgctaactttgtagtagttaacagatcgatttagaaaatagtgggttactaagataagggtgaccaccctttactaacactaaaaagaaaaaaaaaaagctataaccaagtgtctgccatcaccattatagtgtaaaagaaaaaaaaaacaaaaacaaaaaacaaggccaggcatggtggctcatgcctgtaatcccagcactttgggagaccaaggtcagcggatcacctgaggtcaggagttcgagaccagcctggccaacagggagaaacccccatctctactaaaaatataaaaattagccgggcatggtggtgcatgcctgtaatcccagctcctcaggaggctgaggtaggagaatcgcttgaatccaggaggcagaagttgcagtgggctgagattgtgccactgtactccagcctgggtgacagagtgagactctgtctcaaaaaaaaaaaaaaaaaaaaaagttgcaatgacaaattctcagtggggagaaagggcagatcttcctaggaaaagagagttggcattctcatcctgatgtttgccccctggactaatgaaaaacctcattcatgaccacagtctgtatttgagaagctctgtcctacctggtgcttgggttcttaacactcacagacttcctgggtaggaagtggcgctttgaatggagacatgagagctgcctgtgcaggtcagctctttcctttgccgcagtctctttctctgctatcttgctatgatttagtccttaactttttccttttgtctttccccataggcaagaagcgaaaccctggccttaaaattccaaaagaagcatttgaacaacctcagaccagttccacgtaagttgacaagaccatcatctgaatccaaatccttgtgctttcagattcctcctgggggtttatttttggactgctgagcaatgccttgactttagaagagccctttaagggggaagccatttgctcactgttctgagacctgaaatagtcatcttatcagtcagttacgttgaatgggtagttttgaactcagtgtcttaagttattggttgagtaggaagtgaatgtcacatatatttggcagatggggctctatgtaaggccagaaaggcccctggatgtgaacttccttgccttttccctgtagattggagcaaacaggcaaatccctgtgaaagccactactataaaacttgggttgagatggaaagatggtatttggtgaggacccacatcctgacacttaaattctgtcccatataaacagaaggaagaatgaggtaaaggaacactttttttttattagctgaggttttggcccaaatccctaagtcagctcaagtcctagtgaaggacatcgtgtaaatgacatcctctctgtgaggatgtctccttcttgttttttttttttttatttttattttttatctgtctctgtgtggtgggaacggtacttcctgtccagctggaggtacaaccacctaccaaggcatctgcatgagaggaatggaaattccaaggaaactcacaatagaggtgttagagagacagggcaagggcaaagagagggcatcctaatggaaaagtgagttggtaaggcttttgttcatgtctacaaaagtgcctccctttgtgatgggttttgatcttagctatgatctgctatcaggaagtgcacccctagtgttggaatgtgttcttaaatgggatcatgtctgctgtaagactttgttaaagccactggtccttgcattgcgtgaagcagtatacagacactttccactggagaatttttaaggacaaagtagagttgagggctactcttcagggttctggactgtagctcaagagtctaaactcaagatagaatgttcctttcattagaatctgcaggaggaagatccgtcttcccatacttgctgtcaagattgttttctttttctcttttttttttctttttttttcggtctctctgagcaatttctttttctcgtagacctgtgaactgtgtaattactattgtttcctctctgactggtttctcaagagcttacagtcaaatatgtggcctacttttactacctgtataggaatttatgggatatacttttaaaactttttattttgaaataattgtagattaacaggaggttgcaaagaaacgtacagggaagtcccatagatccctttccccaggccatgccaaactcccccgccatcccaagttaacatcttacacaactataatacattatcaagatcaagaatgtggcagtagtgcaaatcatagaacttaattttgccagctatgcaagtattcctttgtgtgtgtgtgtgtgtgtgtgtgcacgtgtagctctataaagtttatcacattgtgtaagtcttgcataagtactattataatcaagatacttcactacagcaacattacaagactcttttatgctcccctcttataatcaaacccacctcttctccccatctccgtccttaatccccagcaaccgctaatctgttctcctttgccattttgttatttcatgattgttatataaacaaaatcatgcatctctttttgagatttttttttgttcaatgtaattttattgaggttcatgtaaataattgcatgtattgatagtttgttccattttattgctaagtacccatccatggtatggttataccacagttggttcaacaccttagcctttgaaggagatatgggtagttttccatttttggctattatgaataaagctgttatgagcatttatgcataagttcctgcatgagaataggtcttcatttctctggggtgtaagcccaatagtgcaattgctgggttatatggtaagcccatctttagttttgaaagaactgctgaactattggccagagtaattgtaccattttatgttctcagcaataatgtccgaataatctagtttttctggatctctgccagcaattggtattatcagtgtttttcattttagctattctgatgtgtagtgatatatatgtagtttttttttttttttttttttttttttgagacggagtttcgctcttgttgcccaggctgcagtgcaatggcgtgatctcggctcactgcaacctctgccccctggtttcaggtgattctcctgcctcagcttccccagtagctgggattataggcgcctgccaccatgcccagctgattttttttttttctttttttggtagagacggggtttcaccatattggccaggctggtctgctggtctcgaactcctgatcttagatgatccacctgccttggcctcccaaagtgctgggattataggcgtgagccactgtgcccagcctatatgtagttttaatttacaatttctctagtggctaataatgtagaatatgtttttaggtgtttattttccatctatatatttttggtgaaatgtctgtgcatatcttttgcccattgtctaattagatactttttattgtttacttttgagagttatttgtatattctggacacgaggactttgtccgatatatatgtgatatgaaaatatttttcccagtttgtaatttgtctttttatgcttttagcagggtctttcacagagcaaaagtttgttcaacttatcaattattacttttacagatcatgcttttgataataagtctaagaaccctttgcctagtcctagatctgtctagaagttttgtagttttgcattttgcatttaagcccatggtccattttgagttaatttttgttcaaggtatgagtttaggttgagctttatttttttggccagtgggttaccaattattctagcaccatttgttgaaaaggctatccctcctccattgaattgcttctgctcctttgtcaataccaattgggcatatttgtttgaagttatttccgcattgtttattctgttccactgatttatttgtctctccctctgccagtatgacattgtcttgattaccacagctgtagagtaagtcataacagggaaacatgattcctctcactctgttctctttcagaactatgttgactattctaaaggcctttctcttttcatataagttttagaataagcttatctatgtccacagagaaacttactgagattttagtaggaattgtgtttaagctatagatcaatttagggcaaattgacatttttactacattggttcttccaatctgcaaacatggtatatttcttcaactttaaaaattttatttctttcatcagcatttttataatacaattcctctatattagattttgttaaaatttatacctaagttttttttggagcaaattttaagtggaatttgatttgtgaacttggttttcacttgttcattgtcagtatatagaaatgcaatagattttttctgtattgatcttgaattctgtggattctgcaattgatcttctattctgtgactttactaaaatcacttattagttctagaagcttgtcatcgaatcgttagggttttctatataaacagtcatggcatctgtaaatggagactgttttattttttcttttccaatctttactttgatttttactttcattttcttgccttattgaagtggcaagaatgtccagtcctaggttaataaagttcatgagagcaggcaaacttgctttgttcctcatcttagagggaaagcatttagtctttcactattaagtatgaagcgaactgtaggttttttgtagatgttacttatgaggttgaaaaggttcccaactatataaaacctctcagtatactgagaggttctttttgattgtttgtttttgtttttttgagacagggtctcactctgtcacccaggctggagtgcagaggtgtgatcatggctcactgcagtctcagcctcccctggctcaagtgatcctcccatctcagcctccaaagtaggtggaactacaggtacatgccaccacacgcggctaatttttttttgtgttttgtagagacggggttttgccatgttgcccaggctggtcttgaactcatgggctcaagcaatttgcctgccttggccctcccaaagtgctgggattacaggcgcgagccaacgtgccctgcctgagaacttttattatgaatgggtattgaatcttgttgaatgctttctctgcatcaattgatatgatcataagatttttcttctttgatctgtcgatatgtagattatgttgattcatttttatgtactcagctagctttgcataccccaaatgaatcccagttagttatggtatatatatttttgtgcattgttggattcgatttgctaaaattttgttgaggatttttgtttctaggcttttgggagatgttggtctgtggtggtttatttattatttctcttgtgctattattttctagttttagtattaaggtaataatggcttaataaaaatgaattggtaagtgttgcttctattttttggtagacattgtataatattggtgctaattatttggatgtttgctaaaattctccaatgaaagaaaatgagcctggattttttttttctgggactttttaatcacaatctcaatttctttagtagttataggactattcagattatctgtttcatcatggctgagttttggtagtatgtggttttgaggagttggtccatttcttccaagttgtcacatttatgagagtaaaattgttcatagtgtttcctgcctatcctttaaatggctgcacaatctgttgtgacatcctttttttttttccctgatactgataatttgtgtcttcttttgttaaatttgtcaattttgcttgaggtttatcaactttattgattttttttcttctgaagaaccagctttgttttattttcctattttcaattttattgctttctgcttttatttttgctatttcctttgggatttattcttacatcaacctgccaggagtcttacatcccttccccttacaatttttattctttaccttttatattagtttacattatagcataaattatatgttaattttataaattttatgaatttcggaaggctaccataaaccctttcttggtataaacaaggataaaagcagtttatattttccctcgtatggtattaataaggtatactgtgaatatacttatctgtttcactgtgtgaagcaaaaagtatcacttcattattgtagagtataccgctgtagctcaaagagtctcgttgttattactttaatgccaaggcttaaatttgtactcctaaagaagtagctcccacattttgtgtttttcttggcaatttttgaaggctggcttggtgatttcttcccattcataccctgcctccttctgctgcgcttcacaaaaataaataggccttgacaaagctccattctcccgagttcaacgtgtgtggcccctctgtttgagctctttctttgagctaccgatgccagtgtgagctgtcccttcccttgattgatagtgaccaattctaaatcagttcgatgctagttcatattatttcatttaaccaccacaagaaactcagaggcagtgtttgttactctcacttgacatgtgaacaaacagaacgatgcaacggtcaggtgcattgctccaagctgttgagcatagcttcatgggtaagagttcagggtctggagccagaacacttaggtttatatttgggatctaaacttcactagttgaatatcttaggcaaaatacctaactgcgctaagccttagtttccttttctaaaaatacaaaaaattagctgggcgtggtggcgggcacctgtaatcccagcttcttgggaggctgagacaggagaagcgcttgaacccaggagggagaggttgcaatgagccgagatcgtgccattgcactccagcctagatgacagagtgagactccatctcaaaaaacaaacaaacaaaactcaggaataacagtgatgttgctgtcatgaggattagatgtcataatccatatgagtgtctagtgtagtgcctggtgcattgcaattgctcaatgaaaggtaactccaagttagtattatcacacagcttctcggtggaagaactggcatataagctcaggaatctctgactctcaattatgtactcttagccacacatcagactggtagaggctgtgagcaaacagtttatggctagtgaaatgagaggtagtatcctttacagcatactgtgcatgagaagccataatggtgcagctctgggttctaatctcattgtctttctaagtgttttttttttgttttttttttttttttttgagacagagtctcactgtgttgcccaggctggagtgcagtggtatgatcttggctcaccacaacctccgcctcttgggtccaagcgattctcctgcctcagcctcccaagtagctgggactacaggcacccgccaccatgcccagctaagtttgtatttttagtagagacggggtttcactatgttggccaggctggtctcgaactcctgatgtcgtgatccacctgcctcagcctcccgaagtgttgggattacaggcgtgagccactgcgcccggcctgagtgttcttaaattatttagtcactttcaatattaattgttgaaagaggtattaatgaggtattataccttgatttcaattcataccctattctatttcaatagaggtaataacacctctgagagttgtaaaaattaaggaagctattttatgtaaatggtctcacgcagtctcttgcccaaataggtgcttaataaatatttctgaatcaatgaatagtgattgcgatagtaaccagtgaactgattcctcatgtaaaattataaatgaataattatcatactaaaccgaagctggttgttcatataaaaaaatgaatactaggtgacctttggaagacctttggtcttccaggggaagaatttttgtaataagcttggttctttccccagaggactaaaatattgaaaaagtgacagagaacatccacccacagtataaacttcctgcagaatcgcaatgcccctggcaaactaatatgcccagccctggagagaacacagtgtcaactaatccaatctgatttgtcagtcttggccccatcatttgatatttttggcccacttgatgagcccaagggcctgcggcacaggcgaattgattattttcattagaggaggcctgggtattgggagcaagttccttgtattcagtctgcctcgatgggaatcgcaagagcaggtaaaaagctcttagcccagttttttatatttccttctcttcttcctctttctcctccttaaatcaaggctgagattcgggtgacttgagttttattttcagctccgttgatgaccgtatggcttcagaaaatcacccagcttttctgggtttcatttttctcaatctggaaaatggcaccagacccttctattaggttcaggggtaatgcaaagttagtatagggccaaggtcagcaaacttttttgtaaaaggccggatactaaatattttaggctacatgggccacagaggatgccgttgtttattttttgtttttttacaagcatttaaatttggaaaagtcattcttagctggaccacaggctgtaatttgctgagccctggtatatatataaaatataagaatattagacttggaagaactcatttttcgataacctcattggatggcaaaaaaacagttgcagccccaaataattagtgacctttctgttgcttcatatttttaaaaagtcaggatggtgggtgacgcctgtaactccagcactttgggaggccatggcaagcggatcacttgaggtcaggagtttgagaccagcctggccaacatggcaaaacactgtctctactacaactacaacgattagccaggtgtggtgcctgtaatcccagctacttgggaggctgaggcaggagaattgcttgaacccggtaaggcagaggttgcagtgagccgagatcgtgccactgcactccagcctgggcgacagggtgagactctgtcttaaaaaaaaaaaaaaaaatcagggtgttgaataattgcaaaggatttttgttgtttatattagtcacatgtttcaagtcatatttgcctttatttcaaagtgccattacaaattagtacaagcaaattttgacaactgaggaaaaatagctttggaaatcttgagaaagaggaattagaattttagaaatttgattcttccagaaaccttttctgaagaaaaattccctgctcagaaacacaagatatataaacacatcactgctgtttgtggggcatgtgtgtgtgttttgttttgcattgtttttttctctctctccctctcagtccccagttttaagttagtataagaaactttaagtattctatgtattccaaaaggattttgaggtgagagaaggcttgccattaaaatcttagagtcatgtttatatctgtatttgtatttctctttttttttgttttgttttttgagactgagtctcgctcttgtcacccaggctggagcgcagtggcacgatcttggctcacttcaacctctgcctcctgggttcaagcgattctcctgcctcagcctcccgaatagctgggattacaggtgtccgccaccacgcccggctaatttttgtatttttagtagagatgaggtttcaccatgttggccaggctggtttcaaactcctgacctcaggtgatccgcccacctcagcctcccaaagtgctgggattacaggcgtgagccactgcgcctccgcccatattcctactttttaattttatttatgtattcaatttcagcaaaagggttagaatcataatacctgagagttagaaaaaatcctcattggcaaaggtttcttttctctctcactttcatctttccattttcctttgcctttttctggcatggaatgtgcttccagagagacatgagtctttacctgtctgctcaccctctttccctcttttctggcagcaccaggattctttcgtctttagcctctagttgttctttttgtttgatcacattaacaatttgtttctcgaaatttgcttttttttttttttaatacagagtctcactctgtcacccaggctggagtgtaatggcacaatctcggctcactgcaacctccgccttccgggttcaagcgattctcctgcctcagcctaccaagtagctgggattacaggcatgcgccacaatgcccggctaatttttgtgtttttagtagagatggggtttcaccacgttggccaggctggtctcgaactcctgacctcaggtgatccgcctgcctcagcctcccaaagtgctgggattacagctgtgagccaccgtgcccggccagcatttgctatgtttattgtactactgttggtacatttctttcaggaaaatgcctttctcagctcctagttgtgtgcacagccagagccaaacatttttctcttaagtagattgataccacctgagagatcattgaagtggtagaaataaatactcaggaagtgactatagaaacaaaatcagcaaacctctggctcttaagaagaccccagaattgtatatgtgctgtgcacagaagaaatattgctgggcttgataagacagcctggttgagtagagaggatgcagaactggatatcaggagacctggggcagctgtgggctgggagcagtcactttacttctctggaccttctgtccatctataaaagaagggacgagatttgaaattcttatgttctatgaattttgtgagttaacagaatatatgccattactatttgtttcttaaaacaattgtgagacatgtggtgaaataattacatatattggtgctcttgggtgaaagaaaaagcttgagacttactgctgtagcacaatgacctatatcagcggtccccaacctttttggcaccagggactggttttttgaaagacagtttttccatgaactgggtggggggatgatttcgggatgattcaagcacattacatttattgtgcactttattattattacattgtaatacatcatgaaataattatacaactcaccataatgtagaatcaatgggagccttgagcttgttatcctgcaactagatggtcccatctgggggtgatgggagacagcaacagatcatcaggcattagattctcataaggagtgcacaacatatatcccttgtatacacagttcacagtagggtttgtgctcctatgagaatctaatgccactgctgatctgacaggagatggagctcaagtggtaatgtgagcgatggggagctactgtaagtacaggtgaagcttctctccttcacccaccactcatctcctgctgactggtattagtccatggcttgggggttgggcaccctaatctatataatagcacatgtatagctcatacgaattagatatttactgtatgccagacattcagctaagcattttacttgtattgtctcttttaatactcactcctgcttcacaatataggtatattaatatccccatgttaaagaagaaagggagccccaaagagattaagtgatttaaacccaaatgtgatttatttcaaatcccctcttattcacactcataggctgctttagtttactcatgaacttccactttcttcttaaggaaaaaatatcctcagtggtgtgtgatttgggaaggacataattgactcaatagcttatgtttcttcttttcccccttatctttcttagaccacctcgagatttagactccaaggcttgcatttctattggaaatcaggtaagaaaaaatcatgtctgccacctaatacgttggccattttatatgtatgctttctgactgaaaaatttattttccctagcatgctgtcaggggatgagtcaaaaaaagtttgcatttaaagggaagtggtatgcaaagtttttgctattttgaaagaatgttgaattgaaatcaggctattgtggttttgatggaaggtatttgaatagagtagatggttctcttgggagggcatttctcaaagctcagacataatctagttgccatcagtcaatagtgggttacagacacaatgaagggtcatggctaaagaacttcagtgaaatagcttcaactgagacattggcaagctgagtccaagttgggtttctgtgttgcctgggacaagcaggtgggctaccgtgggagctcctagacatctcttggcccttcttgtagcttcttgctttcagaggctgctttgacatgctagaaaatcttctggcccagaaataatccttagaacattgagagaaacgagatagaggataatgtgctctctgttctgtttatttttctctttcccattgcattattccttttctctcttgcagaactttgaggtgaaggcagatgacctggagcctataatggaactgggacgaggtgcgtacggggtggtggagaagatgcggcacgtgcccagcgggcagatcatggcagtgaaggtagagttgacattctcccaaatgttttatatctgctgtgtatacatttgtccacctcaattgtcaaccagcccttttaatagaagcaaaaccatcttccgtagggtaaaacagaaaagattatttgcagggaacagtattttcctccaaaggtatggaaaagtcttccttggtgtgagttgtatctactttttatttgtttttttaactcttaactctccctccacccattcttctaccatttttaatttttacaaaactaccatgtcatcatcacacttaaaaataattaatggcccaggtgtggtggctcacgcctgtaatcctagcagtttgggaggccaaggcgggtggatcacgaggtcaggagttcgagaccagcctggccaacatagtgaaacctcgtctctactaaaaatacaaaaaattagccaggcatggtggcacacacctgtagtcgcagctacttgggaggttgaggcaggagaatcacttgaacccgggaggtggaggttgtggtgagccgagatcgtgccactgcactccggcctggacaacagagtgagactccatctcaaataatattaataataataataataataatgatacttccttcatctaatccggagtccaaatgaaaatttccttgatcatctcaaagtgtgtgtgtttgttttgtcctgttggattttcaaatcagcatcccaatgaaagtttacgtattgcatttggctgttatgactcatagatctcttttattctatattttgttgcttttaaagaattgcctctgaaaatcaagaaaccagaattgggagagaaaattgtctccatttgtggaaaaaggagggtaaaatatatctagagtaaatttgcatagtttttgagctatgaaaggaaatttaaaatcatttcatattattgagtaggtgtttggaggatcataaagaattaacatctctagctgagttaatagattggggctattgttaggaataatcaggtgacttggatccttttgcttttaaagaatgggaatacttttatcttgtagatttttcagtctgttcttctgctgacttgctaagtaggcaaaaagtgtgaagtcccagtgatattgtatctctcctatcatttaatgacataatcatgtttctgtaaggctacatttcctagtgtgacagattgttcttccctcagaagcactgggataggaatgaacagtttctctatttctctaattgcttctattttgtatagctgtaccaattctcttacagttgctgttccctccaaatactcttacatgttcccaaagaagagcttttggctttttattttcttgggaccccagataagcagcaaagtccttaatattgtgccctctttgcactgaacagacataatacagtaaaccagattgttttcataccttggaaatacattccaaaacattttgtcactctccaaaacacactatcaatttgtttcttaccaggactattcaggaaatcaaatgagtaacagccttccttattttcatgtgttacaaatagctaatcactttgggtggctattcacaatgtcatcgccagaacttgtgtcatgaactattttcacgatgggactccttcaggtccctgcctgcctcatcctcagagtagtaaccataaattttccatgcatttccattcagcggatccgagccacagtaaatagccaggaacagaaacggctactgatggatttggatatttccatgaggacggtggactgtccattcactgtcaccttttatggcgcactgtttcgggaggtaggtgacccttcaattcaaagtccaagaggaacaataacttaaaaagaagtttctttgatcacgtaaatgccttcacaatcatggagctctttcttgtttgacacatcttgtatacgggggtttacgtgtgtgcaatgatgacatgccctggagcaaggttggattgaaattatggtattttcaaatgtggttagcctttttaagatgtggagtttctcgtctcctttcttttttgttttgtttatcttggcagaactttctatatcgcctatagactgatttgcttagatctcttataatttgaaatattctggtcttttgactgctttaggagcttcatctagcctacttgtgtactatatagacttactttgatctcttttctctacctctgttttccactttagcgttatatggattatgaggcttcacctcattaaaaccagctttttgactgactgttgctggtatttagtgtgagagatacgacatggaggaggcatctagacctaactcctagacagtggtatcagtaaaggcctggatatctggggttgtattgcttatgtctgttagtaattagattccatttttcattaaggggtaggagagcacatgcaggttctgcttggctacctactggtttgctctttgtagataaccttgcttatttgtaaattcctttatgatcttgacagaagacactgtatttccccccaaaattcaagaaagaaatagttaattcttcaggatagggtttactgttttttttttttatttttatttctccctttttcatccttttaaacaattcctgaaacaattggtctccagggtgatgtgtggatctgcatggagctcatggatacatcactagataaattctacaaacaagttattgataaaggccagacaattccagaggacatcttagggaaaatagcagtttctgtgagtacattttgatccctactgcaaggataatgtgagaaataaagtccctatgtgtctttggacctcagtatgaagaaatactacctgggccacagctactattcgtacatgtctgttgacatttattggtggatggataaatacatgctttcctttctgagcactgtgtagaagattctagcactgctttggtttggcagactctaggttaaatgactctaagtgctgcattcatcagctatgaccacattcctggtgtctatattctgacattagtttattttgattttcatttatggatttttaaaatgttctcttgagactagtaggcatagaagaaagcagaaggaaaataaatagaaagaaggtcttctaccttcatggctattcaggctcaggagggtggagagaaaaagaaggaggacaaatgaacaagacagatgagggagacatcctctctgatataagatacagtcctctctggtggatggagtccaatttgtgtaacttcctatgtattttcctagataggaccaccactatttgagaaaatatctcactggtaacctaaagccaaggataataaaccttgatatacttaacattcaatttctttccagcaatgtgataaataaatctatcttgtgtttctcttgcagattgtaaaagcattagaacatttacatagtaagctgtctgtcattcacagaggtaagcatccatgagctgccttggctgttcctttgataaagttcatctctttcacctggagtccgtctctacccccagtcccccatgggtggaagtagaattgactcaggcaagagaactaaggggctttcctttgagattggatagcaaaccatataagtagtattccttatcatggctgaggacataagaagaagacgtgatctttgtcttacatccaaattgaatataaacacttgttagcaagcagagctatgagatcatatcattgagaattttagagaatatgataaaaattgatcttgtattggccatcacatgagagcttgttggaaaagaatcatgggtctcaagatcaaatgaattggaatttgcattttaacaagatttccgggtgattcttgtgcacatgaaagtgtgaaaaactctggtataaagtagagccctttcagacaacaggaggcaggatataatgatttatctcttcctctttccttttcttccttcttattggcctgttatctcttcaaccagccattcatccatccatccattcattcattttctatccccccattcatccatttattcatcttttaaaatcacttttaaaatgtaatagatcccctgagaggtatctgagaagaaaatatattctgattaaattatgcatcaggattcttatagggaagtaagataaatgtacaaaaaaaaaaaaaaaaaaaaaaaaaaaccaccttagaaatatgaaagtaccaagctgggtgccgtggttcatgcctacaatcccagcactttgggaggccgaggagggcggatcacctaaggtcaggaatttgagaccagcctgcccaacatggtgaaaccccgtgtctactgaaaatacaaaaattagttaggtgtggtggtgggtgtctgtaatcccagctacttgggaggctgaggcaggtgattgtagtgattgtggtgattgtagtcagggaaacttctgggaagagataaccagaaccctgtctttgggaagaataatggaatgtattggtaagtaagagggccttgtggtttggataattcttaaactctctgagcctggaaataatgtaaaatgccttccacagtgtgcctattattgttagttgttattattaaaaattggaaaaataggatgaaggaagatgagaagaaaataggaaggaatacagataggaaaaagactgtagattattcacaactttgaaattaacattaagggttatttcaccattatgaaatatgtaattcatattagagaaaatatgtaaggtataaaaataataaaatgaaatttgtgtatcttctagcttaaagggaaaattataaaggataatttttaaagcttttgtaataatcttttacttccaattttatgggtgttatgaaaagtatcacaaagggaaaaattagctgtaatttcaaatgttattatccagagataatcgtagttccattttttgggcatatgggcgggtgggttaaatttttctagtcaaaaggattcgtttaaaatctggtctgtaatactgcttcttcagtaacctgccctgtggtctggaatacctgggtttatgatcctttacactatgtgacctctgacacatcgctagcagaggtttcaatcaaaatctgttgctttgggccaggcttggtggctcacacctgtaatcacagccctttgggaggtggggtgggaggactgcttgaggccaggagtttgagaccagcctggtcaacaaagagacatcctgtctgtcaaaaaaaaaaaaaaaaaaaagttagctgggcatggtggttcccacctgtagtccaagctactcaggagactgaggcgggaggatgatttgagcccaggagtttgaggctgcagtgagctatgatcacaccactgcacaccggttgagtgacagagtaagaccttatcttgaagaaaaaaccaaaccaaacaaaaacaaaggttgctttggtcatatttggtgtatcattgtgtcacagtctgcctttttgttctttgttttattactcctacgttaaatatcaatagatcattttgaattggacatttgattcagtaataattttttaggctcttactacaagtatgagggtaatgaagatcataaaatcagtggagaaaacagttctttgtatggagaaattcacaattctacaaggcatgaacaaaacatgaaatagaaaatcaagttgaaagcaataagctgttgttaactgtgggtcagggatggcagttacttctgtgttgggcagcttggggaaaggaagatgaaggacaaatggagattttaggccctctggtggcagagaaatgaaccttgaaagcaggctgaaatgatggcatcctggttgttttcgctttcagacgtcaagccttctaatgtactcatcaatgctctcggtcaagtgaagatgtgcgattttggaatcagtggctacttggtggactctgttgctaaaacaattgatgcaggttgcaaaccatacatggccgtaagtacattagctagggtggcatctggtaatgtcactgccgacaaatcatgctgggaaacaagaaatggatggccacagagggaaaatggaaatgtacctaagactccagaagtagtctgcctcttagtatttcttcaaaattttatgtctgaaatctttactcacttgcttcgtatattgtcttagtttgttcaggctgctatggcaaagtaatgtaagccaggcagcatataaacaacagaaatttatctctcacagttttggaggctaggaaatccaagatgaaggcaccagaagatttggtgtccaatgagggctcacgtttctcaggatcatacatagcaccttcctgcttagtcctcgcacggtgaaaggggcgagggatctctctagggcttttttaataagggccccaatcctattcattagtattccactttcatgattcaatcaccccccaaaggccctgccttctgatgccaccacatgtgcgattaggttttaacctgtggattttggtggggcacagacatagttatatatatattactttaaaaaaatcaagtgaaagagatacgttatttgaaaaaatatatacacaatacatatagcctgcacagttttccacactgtattgcaggggagtattaccttgtttgttgaggacaaaatagtaaatagagcttaaattacccaaacaaggcagttagattagttatgagaggacctcacagctgtgaagattcaccgtcattagcagagaccttgcaatcccctttaactggaggaacggccactagattctacctggaaatggacttgtgctttgaattgaaaagcttcctgtctgtgtttagctaaaaattgctcaggtctattagcatgggacagtagcccagtgacacttgttttattgagttctggactgttcatgttttaaacaaggataattctagatgggcaaagtagctttataatgtataccctgtttcttcttaaggcaaattttaaatttgttatgaaaggaacttgatccattactgtgtccaagaaaagacaaacacagaagaagggaaaccccacggaggcattgatatttgttgtagttaaccgggtcttcttggccttggtggcatgttaacagcttataacaactcacttggcagctggtgctacccccatccccagagactattgagctaagaacgttatctcaattgtcttcccagtttctcagttgtctgtcttctttccagcctgaaagaataaacccagagctcaaccagaagggatacagtgtgaagtctgacatttggagtctgggcatcacgatggtagtgtatgccaatcatcatgaactatgaggttgtgggtaatgaaactagaatgaggtggacgttgggttcaagaaacaaatgccctaaatgctggtttggggcgccctctcctgctgagctggtaggagattttgagtaataattgtttgtattgtggtacaataaaaacactgatatgggattggggaaaccaatctttctcttgattccacctctgacgagctgtatgcctttttgagtaattgttacagtcacatggactatcttcctatcctcctctgtaaaacgagaggatctgaccagattccttatagtttaaaattaaattattcgagccaaggcaagaagcttaagctgtgcaaagaatgctaatgtgcgtgaaccctgatagggccgtgttatccaggacatagactatgcttcccaggatatttttattggagaagtagaagtcaaagtctgatcaggtcagtgtattagttcgttttcacactgctgataaaagcatccccaagactgagtaatttaaaagaaaaagaggtttaatggactcacagttccatgcagctggggaggcctcacgatcatggcggaaggtgaaaggcacatcttatatggcggcagacaagagagaatgagatgagacagccaagtgaaaagggagatgcttcataaaaccatcagatctcgtgagactttttcactaccatgagaaccatagaacagtatgggggaaccacccccatgattcaattgtttcccactgggtccctcccacaacatgtaggaattatgggagctacaattcaagatgagatttgggtggggacacagcccaaccgtatcagtcaggtatatcctcaatacatgataaccaataggatgatttccttagacacagccctaaagttatatgatttattcataacttattcataactttggtgattgtaaatttcataactttggtggtcatacattttcagtggatcaccaaggtctggaattatccactgtggtcctggctcctccccaggcacagcagctgaataaatcccatgagttatttctcctgcctgcccagaaagcacatgatcctgtaatgcaaagtggccttttctcaagtccaaaaaaagatctgtcatttggttctaggttgctttttctccctgtcatttcaccaagggacctgaaggtggcagtagatgctcggctctggaaagatcttaggctgggaattacttgtcagaccaaacgtttgaaatcctcgtagctttacatcctgaagtttaatacggttggcttacaatttttatgaagtgccacagtgggttttagtgagggtccccattttagataggcttaagtggctgtgtctagtaagtaatatttaaaaatccctagcactaggaatttggggaaaattgctagagaacaaattattagtttatttcctgcccccctacccctggacttatacttgaactttgccttgtgtttcctgctgtctatccacaaatgaaacgtgggtgattccctaaagcagccctgttgaaactgttgtctccttttttcttcttttctccagattgagttggccatccttcgatttccctatgattcatggggaactccatttcagcagctcaaacaggtggtagaggagccatcgccacaactcccagcagacaagttctctgcagagtttgttgactttacctcacagtggtaagacagcctcacctcccaagtgtcagtgtgaaagaagaagatgagttctcatgaatttcttccatcggggttgaatccatcatgcatacattcattccgaaagcatttgtggagtatgccctctctgctggagaagcaaagatgaccgtatcacactccctgccctcactgagcccaaagtcaagtagagaagtctcataaatgaataattatagtataatgtggcaagtccagtgatagagataggggcataggcgatttaaggaactcagagggaagacctcaggataggcttttctggaggagataaatctggagctgcgatcacgagaggaattttccagacaaaagggaaataggaaaggaaacatattccaaacagaaggaacatcattcacaatgtcacgaaagcaagaaactcctttatgtgagctttaagcaatttgatgttgattaaagcataaagagaaagctgataggacccactagaggcctggggataggaagtagaggcaaagaattactttcggtgagaagatagtgggtagtttgagagtgtttcttaggtccccagaagtcttgtagaaccttggttgctactgaatacttgctaactgtggagaaacttgcccaccataagagacaatgctgaagttctgggaagggaatccaaaggaagttggggtggaaagtgggagggagccatactcatgaggtgaactatattttcatgaaaactgccagggcagtcaagaaaagcaagaggggaaagtattctctagacaatccagtaatttctatctgcatagaggtcatgatgcctagcatggcttgatagtaatgatcatggcaagtgatgctggaagcaggatgccagaagtgaagcacacccctgagccaggttagcgtatttggccatccgggagaagtagatgagaattaggaggaagggggctcggagatggtggcaggcccagctgtgaccctgggaggggagccgttctgagtactcactgctggggaagggcctggagctctgaaggctgtttgaggtactgaggaagctgaaggaacatcttccccgtggcttcattcctcagcctccatggtttttagaagtgctgtgaggcagggcacccgcgcctgtaatcccagtactttgggaggccaaggcgagtggatcacctgaggtcaggagttcaagaccagcctggccaaaatggtgaaaacctgactctactaaaaatacaaaaaattaactgggcatggtggtggacagctgtaatctcgggaggctgaggcaggagaaccgcttgaacctgggaagtggaggctgcagtgagccgagatcacgccattgcactccagcctgagcaacaagaataaaacttcgtctcaaaaaaaaaaaaaaaaagctgtgaatacagcattcatcaggaaacatggaagaaacataaaacaaagcaactgtctgttgcttgtgaacctaagagctcttcgactctttgttagccctaggccccttctcatttctggtacttttccctgatgatgtatgaggctggtctgcagttgtttgtttttgtttttggctggatgactagagaggggctggagcctcgagcactagtgtaatagttgttggatgcctcttaaaagatatatcttctaggctgcttcctgtctgttttccttgagggagtgtgctggatgtggtagtacctctgccaggttgacctgggttcatgattttgccttctggattcaaagacttgttttttgtggatggttggttggttggttatttatttatttattgccttatcctcagatgtttaaggtcacatcaaaaaaagggatgaggggccgggcgtggtggctcacgcctgtaattccagcactttgggaggccaaggtgggcggatcacttgaggtcaggagttcgagaccagcctgaccaacatggtgaaaacccatctctgctaaaaatacaaaaattagccaagtgtggtagcacacacctgtagtcccagctactcgggagattgatgcaggagaattgcttgaacctagaaggcagaggttgcagtgagctgagattgcaccactgcactccagcctgggtgataagagagagacgccatctcaaaaaaaaaaaaaaaaaaaaaaaaaaaaagatgaggcatcttgggtagtacagaacagtagttctcaagaggggtggtaatggggaatgatcttatctagctaagtctcttcaaattattctccctattacctttctcccacctatccccttttcccaagattctgggtgctttaggaaattttggtaagaacgaggctggtgtgaaaagtttgagaaagctgagtctaccattgtgaatcaccagtttaatccaatgattctcaactgtggctgctcatttataaaactctagtgagctttcaaaatcactgccccctaggcctcatcctcatagactctgatttaactgatctggggaggggccaagatactaatatatttttaaatgttctcaagtcatttttatgtacagctgcggtgataaccccaggtttagacatatgatctatggacctgccatcaactagtttctgtttagaaggtttattttcttcaatttgtttaaaaaaaatcatccaattgcttgaattttctttcaccagtgtattttttctcttactggaattttctccgaagaatcagagcattgaaactttttagagatattttaaaatgaacatcttgagaaataaatggtttttaatttttttttttttttttttttttggagacggagttttgctctgccacccaggctggagtgcagtggcacgatctcagctcactgcaagctccgcctcctgggttcacgccattctcctgcctcagcctcctgagtagctgggactacaggtgcccgccaccacgcccggctaattttttgtatttttagtaaagacggggtttcaccgtgttaaccaggatggtctcgatctcctgacctcgtgatctgccccgcctcagcctcccaaagtgctaggattacaggcttgagccactgcgtccggccaatttttctaattttaatgtatgcacacatatatggaagttccagataccggcatcattgctcttcatataatgactgccctgtgccttctctctccttataacacccatagtgccttcatggctgcctgcaaagatatccccttctctctcattttcttttaattttaatcccagctaccacagttcattaattaaaaaattttgagccgtagacatgtctcagctttcctgaaactgttaattctattaatactgtttgctcggtgtcatgtcatttctactcaagtaagtcagtttgtcttatatctgggtatattaaaaacaatactctgtctctacaaaaaatacacaaattagctgggtgtggtggtgtgcacctggggacccagctacttggaaggccaaggtgggaggatcgcttgagcttggaaggctgaggctgcagtgagccataattgtcccactgcactccagcctgggtgacagagcaagatcctgccaaaataagataaaattaaataaataacaaaatgcaatataaaataaaataaaatatgaaactatctagaaacaaaacccaaatcactttaccctagaagtcattaaaagataaattttccttcctcaaagtgtcagtattatagttctggtagaatgctatacttaagaatatcagttgtctaaaatagtcattttgttggtatgggaattaagaaatagaagggaatcgttaattctgaattttatgagcattcttacttatcctcagtttgactttttcagcatgcaagctctcctatttcagatcccaggtcaataactttttttccctgccacaaaccaccaatatattttctttgatatcccttaagtatgaacattatttttcaactgggttgaaaaagtcatcttatactcaaaaagtagcactgattttcttttagagtttatgactggcctagaactttacggaagcaattttatttttcatacatatattaatatatgggtacatacctccagccattagccatctagtgattttacttgtttgattactgaaagcttgaggtttgatctggagcttggtggaaagaatggaaaagtgataatgttaacagaagagtacctcttctacctcttcatgaacattccctgtgcacgtaactcccctttatcagctattcttttatttttctcatgaataaagctgtgttattgagacataacttcattaaaggacctttttttttttcgtgagctccatgttttttatatttttattatgtaggctatggtcctcccagacttctcagaaaggccgctctatgtgctaagtggggaagggagactacggatttcaaaagtgaaatatttaatctcaaatttcaagatagatacatctatgtttttattgcctacatctgtctttggtatgcagaaaaagaacccattatacccgcagcctaggtaactgtcagagtatttgtgaacttgtgtatcctacctaagcattcgatgtcacaaagctactaggtatcatacacctgcctaggtatcatacccgtgccaaggaatcaacttggcacgatgccatcaccatgttgcaaggtaccataattctgtatccagggaattgacttggtagccactcttgtctggcccatcagtattgatcactgcttgttagttgacagtaaatcacttagtttgtagggtgaagtagaaaagctctaacaggctatcatcaccacacccaaagttagacctagagtccagagttccagtttttgcatttcttttgcagtaacatctgacaaatgttatcttgaaggagaaggaagaattaaccatatgaacgtaaaggaaaaaagcaaacccacaatggtttcttacaaacccttcttttctgtatttattttgagataggactacagaatgagattttcttcctctttttcctatatatctctttcttatcgtaggggttttaaggagttcttgagttgggttgtgttgaccatgtcagccttgttttgagattcatcatagagaagtctaatagagaagtcttgctttctagtcctgcagaagggttaacaaacgagttcgcaaaagattggaatcttagccggtttacacttttcattataaactcttcctataggttcacagaaggaagtcactggaagtcaactgccgagtgccagatcagctggacttccctttggctttttctccaggcctatttaagaagctgtgggcccaactgaccagtctgatggcatattgaagggtagtggaggcccactcaagcatcaatattgtctgactcagggaaactagcataaaacacagacagtcaaatacagtctcctacttgtgtaggaaggacagtaaaaagaggcactagatgtttatttagcttttgacaaatgtatgccttgaaacgcgcaatgtgtttttattctgtggatgtaccaaatagcccttcttggaaatgatcgggggaattcaaataggcagaaatcctctggtcagcacaaactacaagctagcaattctcaagacagcatgagctgttttttagtgtcagctatggtcagaagcgtgtgttgtggcatttggaaaaggaattagggcagttagctaattgcacgcttgaaaatgagaagctctttgaaaattcaaaagtctgattccagttcaaaaagaaattggtgttgctttgaactccaaagttgttattgtatactgaatttcaagtacttcctactaaacatggaaaatttgctttccccccaaccttatcctgagtgtattgctattcttagcccatgttttgaagtgttcttgatttaaaagatggagagaatgggttatatcagttccattaatttaataaacagccttgctttgcggtgtaagtattttccatctatattctgcagtagtgtttggggtagattgtgagctttctaatcaggggccatgagtcaaggaatagcctattgaccagttagtcttggaggtttcaggaatccttaacactttatgatggatcaactagggtactttccccatattttctttatacagagttaacaaaaatctggagattttttttttcttttttgatacagtctcaccctgttgcccaggctggagtgcagtggtgcaatctcagctcactgcaacctccgcctcccaggttcaagtgattcttgtgcctcagcctccctagtaactgggattacaggctcctgccaccatgctcagctaatttttgtatttttagtagagtcggggtttcaccgtattggccaggctggtcttgaactcctgacctcaagtgagctcaagtgatccacctgtctcaccctcacaaagtgttgggattacaggcattagccactgcacctggtcgagaaatctttataagctgttccagaagtgaaaagataagatatcctgactcaaaatcagtattttaaaaaaatacagcatttaaaaaaaatacagtatttttaaaaatggagatgtttaagctcatctatctgttggaaagagacagtcattttatcttttctgctaaatataaggtaaaaaatcagcacatttttacatttgagaaacaagcttttcttcctgacattgccttggttctgttgttgaccaatgaaagctagtaacggagtgggcctgggtcctcagtgagagtgttccagatgcaatgcggagtttaaggtctaaatagagacagccagaatcaaccatctgaatattgagtgtggatttaatgttgtgcttgcactttttgttatttacttagcgtgttacattgttccagcgatagagaagcatttctggtttttgatttgctttgaacaatagtgggaaattcagggcttctagcctgtttgttttttttttttttttttaccagggtctgtgtgcaagtcagcaacgctcctgggatcacattgcttcttctgtgtttctttctaggtaaactagctcttgaacttagaaagaaacacttttgcttcctggggttgagggcaggagacggtcgtggtgagaatgtgcttaaagacaaagacaaaccagctggagatggtccttttaagtgaaggggagaggaagccgcaacaaggagggaccacctattacacaaagcacagcgtttcttaatctctgcactcatgacattttgggctagagtgttctttgttgtgcgggattgcccagtgcattacaggatgcttagcaacatccctggcctctacctattagatgccagtaacaccctgccaccagatgtaacaaccaaaaatgcctcctgacattttccatatatcccctggggagcaaaatgacctccagctgagaaccacccacgtagactctcagcatctaggtacctacaaaaccatcggtgggagttacacggactcattcatttcactcagcacacattcccatatcaatcagactttgccgcctgttaattcctctttctaatgcgctcttatttttatcctcagttgagatgaaactttctctcataggttgtctggtcactgaggtcactaggtcctaggtctgccctcagttccaggttgaaacttctgtcctcacatctacctgtagcctgtctcaggttccctggcttccacccacagcattgcctggaacaaactggtaggctgattttaagttgttttggttcaaaaactttctctctctcttttttttttttttaattttatttcgttttaaaccacagtttctcaaagtgcctgaactacttcgctctctcatggttctgtaccttaccccgtcatgcttagcttcggagggtgaggcagagctcacgtcacacatgctaggtctcatttgctcaaaatgatcccttagctcaaatcccagcaacctaacaatcagttacattttgattcctccaactccaggcaaaattcctttccattccaatgccaggcaaagctcctttccattcatgtatgattttgtggtccgttgggcacaggagtctgtaggttgccttgcaaatcatagttttcaaaatcatctttttctgcattctgtaacctgggattccaactccaagtaaattgtttcttttcttttctttctttctttttcttttttttttttcattttaaggccagagttggatagaggatagggatgggctgagaatggggtgatgggttggtctcttcatcttacagttttattactgttaaataataagtaacagcatttattgcctccggtatcaaatgttattaaatgtctgtgtcaatggagagcagaataaccagaagtcacctgacaatagcgcatgaccataaagtatttctaacaagaataattgctgtcactgagtgcgctctctcttttatcagctgtcataaacaggtcttattacctttgtcataaacaagtagtattaccttagaaatgttatggggggttgggcacagtggctcacacctgtactcccagctctttggaaggctgaggcaggtggatcacttgagcctaagacttcgagaccagcctgggcaacatggtgaaaccctgcctctacaagatacaaaaattagccaggcatggtggcacgtgcctgtaatcccaactactcaggaggctgaggcaggaagatcacctgagcctagggaggtggaggctgcagtgagccgagattgtatgcccctgcactccagcctgggcaacagagccagcccctgtctcaaggaaaagaaaataaatattaggggtttattgcttctatctcaggcagatttggttaggactatataaaagcaaattatacattcatgggaaacagaagcaaaaagaaccaggtacctgacagtgaagagataacaaatggcaatgtaagaaacacttgccaatttctttgtctgtggaaatggcattaaagctgctttgaaggaaagtagattttttgaaataaaatggctatagatcagaaaaattagtgtgcatatcatcggtaaagtatcaaaaggaaagtacacacacacacacacacacacacacacacaactatttttcccattaaggcacaaccagggtgatttaaaacatgatacataagtgttacagaagaggaaagtcaagataggaggctgtgttttcaatacacttttaaagctgattatgtttagtgttctacaggttctgaaatccttgtctaatgaaaatatatatggcttctagattttaatgattatttttttttctttaagcttaaagaagaattccaaagaacggcctacatacccagagctaatggtgagtattgttagcaacgtaaacatgactatactgatagctacaaaaggcaaagtcactaagacctaaattatcatcacatcaccatattggaagagttggttcattgatacatcagtgacaggaattgaactccaggaaagagagttaaagagttcatcctacatccttcttaaacataggttgggacctgtcactattcttagtagtttttttccaggctaataaacctgtcatgatacagagcaaattatgtgtatacaatttatatttttgaatttaaaagatatgagaagcctcatattactaagataaaattaaggaaagtatgatttaagagatttcaatactgaggaaaacttaaatgctctttgactgatcaatttttgatcaaatatctgggctaaattagatgaacaactttttggggggtagctaaggaggaaaaaaaattttgctttttgttttcactttggtggaaaaaagtaagacaaagcatgattagtttaaattatactccctcagcattcacagtttatcacttgctgtgtctataaaaagcaagagtgaagaaagtaatatcttagcattgtttgttgtattaaaataacgtttcttaaattgtggtaactataggccgggcatggtggctgttcatgcctgtaatcccagcactctggtaggccgagttgggcagattgcttgagcccaggagttggagaccaacctgggcaacatgacgaaaccccacctctacaaaaagtacaaaaaattagccgggcatggtggcatttgcctgtagccccagctactcaggaagccgaggtggcaggatcacttgagcccaggaagttaaggctgcagtgagccgtgattgtgccactgaattccagcctgggcaacagagtgagaccctgtctcaaagaaaaacaaacaaacaaacaaacaaaactctggtaactacaattctaagctaattactaatgattctaaaagctaaatacaaatggcaaggacctaaacttggcaatgctttgctttatctaagtatatgttgaatgtaggagaaacacatttttgggggggagaaatatataaaattcagactatttgctaatttatgttaattcctagatttgtttcaattatcaaggttttcattttagcaggggaaggaagagttacgttcatgcacaatttcaaaagcaataaaacactgacaccctttcttactggaacacagttattcatcaggcattaaatgcttgctcctctgctatcccagccacaagccctgctgtcttcaagaccaactcagggcatgtcttagaagcatggattcctagtgtcaaatgctgtggtgaggtggcttagatatgaggaagcacagcttggaaatgtcgagtcaggaagagttacagaaagctgatcaggaagatgcgtgatagttacagccaatcacataggttttcacttctgttgcctaagctttgattgaagattgaaccattttgcaactggatgaattggagatgagaccatctcattgggcctccattgggtgcattaaaaggcagcccctggtgctcagcactctaccatctttattcaactaaaactcacagttaaagaaggaaatatgagtaatgtttgagaaaatcctagcatagtacatgtttaagttgaatattttcttcccgattattttttaatagccagtcaaaggcttttttggttctgtttactctttttaaatatgcttatgcacccgctaggccattttaaaattaatttcatataaaatacagtagatatacagttattcttgtaggatactatggagcctgtaatcctattttatttatttatttatattttaatttttattttttagagatggagtctcattatgttgcccaggctggtctcgaagtcgtgggctcaaacaatcccccggcctgggccccccaagtagctgggactacaagtgtgcacctgtactcctattctaaagttgccatgttttgtaactaagttcagataagaagaacattttctatatatttctggctactttttcttcttccaaatggtttcggatcagaaatttcactgaaacacacttgagaaaagaatgcttaatatacatgggcagctgatgtcaaattctacatttgtaatatgttctaaccctgtgatattttatggcctacatatatatcaatgttataaaatcatgtcagtcccccttttcttcttacagcattagtctttgtggtactggaaatggacttgccttttaagactataactgttccctgctttcctgtggaactgaggttttcaaacggaaaatctgagtccaaactccctgactttagcattgggaaaacacttgctgagaggcaattgtttagattttaggagttggtgaggaagtatgaaggaaaaaaataatcctttttccaggtgaaggacagtttaattaaggccttaacctagacatgtccctcttatagaaatcccaaatgtttctctccctaacacggattgaagggtgtgtattctttaagatcatgtcatttgcttcttctctcaaatgtcactggggagtatgactcagtagaatttgttcttctaaagtaggtagcagccaacgatttctgtaaaggactaaatagtaagtattttagtctttgtaggctatacagttgctgtttacaatggcttaattcagtgttgcaatgtgaaagcagccatatccgatgtgttaaaaaaaaaatggggtgtgtgtggctgtgttccaataaaactttatttaaaaaaacaagcagtgggctaaatttggcctctgggtcataggtagctgatccctgtcctagatgataatcaccagaaaagataaccagttcattcaagtgattgcccagtgaaataatgttctccaattatcttaggaagttctagattgaactgtatgttaaacaaagatgcctgacccattcaaaaccatagtcttaagggatgaggtgctgtgcatgggacagggagacctgctggtgactgtagcttgtctgtctattcctcgtagtatgttcacggatctccatgttttcttcaggcacatcagtgagactaaatggtgtaaagtcctcccttcttgtctccctggctcctcttttgggaaacccagcctggtattatagtctgagtattattcatagtccctcatttgtcaatttcctggttgctgcccttgctaatcttaatccattgcttataggagggactgggttccctcttaaccttttacagcctcaaaacccacacaagaaggcaagtcacactttccatttgtcatgcctacccgttttcccctccccctgcccttctggctctcatagcattttctcaacctgggaataaatggaaagatgcctagcgattttctttttttttgattaaagacttcaagtcaggttatttaattcatttgcagactcaggcaacatctactgagctaatagccactagcagaacaaaaggcaaggtggggctggcaggtgttggaagcagtcaccaagataatctgaggtttggcatgtcctgttttgatagtaaaaagcttttaagtacattaaaagatttccaaatgtccagaggatgtgggaaagctaataagcatgatggtagagtccttggtaagtgtgctgtgtatgtggtgactaatcagaagtatggctgctatttagtttttgagggagctcaggaggaaggacctggcactcagagcttcagttgatttcatgagtgtaaggatcggagccagcactcaacctgtgtcctcagatgggcaaagggagaaaatctcttttccattttctgagtcatgatacttaatcgcgaccagctatcttctttggggtttttatttctttgttcctttcccatttgcattgtttcctagagtttccatgagcaggaactcagttttccacggagctgactcatccaaccctctgctgtcaggtttaaaacaaatataattagaaaacctacagctgggcaacataaaggttgtaaactaaactccctaaagtcaggggaaacagagtgagtcacttatgtgtctggatgtaaaaatgcttacatttagctactcaactggtcattgaaaatagactaccaggcaatcaagggagtgagcatgggaggtgagacacgtgggactaagttctacctgtaagaattatccatttggggtaggtttggttggttctatttccactataagaactgtggctcatgacctgatatatctttctaagtagaggtggcaggttccactgtgagagctgggcacttattgtaacaaaattgagcaatctggggagaattgttctagtgcagagaaaatggcttcctgctcaggattgttttgaaatgcatggcctcttgaatcacataccatgcttgttcccctagcaaagcataagacttgttatgtttttagagtttacttgttctgagctgtgaggatagagactcttcttttcccttttcaatctttaatctccgagttcagttttctctgcacataactagagtttggcagtctacattatttttcagatggatcaactcttcatcaggagagacataaataaagctcgtggcttggcaaatggctttaactgttttagtctaaaccaattctccaacgtcaagggcgagggctaccttccttgcacgtttactgttcaacaaaattggcttctcattccatcatctttttcctgagaaataaaagtgcatactgctggccgggcatggtggcacacgcctgcaatcccagcactttgggaggccgaggctggcagatcacgaggtcaggagatcaagaccatcctgggtaacacagtgaaaccctgtctctactaaaaatataaaaaattagccaggcatggtggcatgcacctgtaatcccagctactcgggaggctgaggcaggagaatcacttgaacccgggaggcagagtttgcagtgagccaagatcgcaccactgcactccagcctgggcaacagagcgagactccatctcaaaaagaaaaaagtacatacacctatgaattgtcttattatcttactactatattagcctaaaatgaccttgtggggcccagggctatttgtaaatcagagtttgggttgttttttgtcaatctttgtattttgctgtagatgagacttacgtagcataattacacttttttttaaaatttaatatagtggaaacctagagatatcaagatggaaagagtgacaactaagagatatctttaaaatgtttgcatcactagatgtgtgcttgattttggaaagggtaggaaaagcccagcctagctctgatagggatacttaatccctgtaccaagcagatctattcatttgctaatctcatatattgattgtcagtaagacattaataccatgttttttctttttcttttccagcaacatccatttttcaccctacatgaatccaaaggaacagatgtggcatcttttgtaaaactgattcttggagactaaaaagcagtggacttaatcggttgaccctactgtggattggtgggtttcggggtgaagcaagttcactacagcatcaatagaaagtcatctttgagataatttaaccctgcctctcagagggttttctctcccaattttctttttactccccctcttaagggggccttggaatctatagtatagaatgaactgtctagatggatgaattatgataaaggcttaggacttcaaaaggtgattaaatatttaatgatgtgtcatatgagtcctcaagcttctcagacttctcttattctttacaaaatgaatgcattggccctgacaaaaaggtgctacggtagtgatgaaattataagtagatttgtagtttgtcccatttattattttaatatttatgtttaagtgcttggttgaaaagattccattttatacaagaagggagattcaaaaaaaaaatataaggttgggttagcaatatttatagggcttttattttttaagttcaattgtgtctgtggtccagaagaaattatttaatatgcatctttgagaatattataaaaatatcaaaaaggagctcttcttgtgaaatgtctgttccagctgttgtgactgctgccatttttgcaaacatctgcccaatcctgggtgatcaccacatcttttaggggaagtgacaagatgctctggtcatactctttttcccaactttggaaaacataaaaatcactcatataacagctcaaagagtaaaacatttggttcttctgacacttgtggtatagtattagtggaaagtgatttgtaatatgattttatatccacctacctattcatctacctgtgtgtatgtgtgtgtttgtgtgtctatttggcaattcacaagtcctgccaagtggtttctatgagcatctctgtttggtaaggaggacaattgtcagttttgagggggacatgtgttaaatcacagaaaaaaatggtgccttcttctgcgtttgtccctcctgccatgtgtaagttgtaaggattgcctttgtagttaatgtactctttggctttgtttgtttgttttcttcttcagtgaagcagccttactattcatagaagggctagaataggagaaaatgaaaggtagtgagtaattctttgataagatgaggaaataatgggaaaggttgaattaattcctgggcatggactaccagatgaccacaagttgcgttgaggccgcatctttcttcagcagcgtgcaatagctggctcctctataggagatgagcttcattgggagttcctagcaagttgactaaacagcaaaagttctttctcgtgggtaaatatacccacaggttctatgatttgtagctctaggtttcttgatgatcaaggagtgaagtaattgacagggaaaatatagacctatgataaataaccaggaagcattgcttttggacaaggaaggacagagggttttgattttaaaaagaagaaaaaaaaaccttattttttctttcttggcctcaagttcaatatggagaggattgcttccctgaatcctctcttccttccccttttagattttgaagtgcaatcatatgtttttctctgtttgcattttttcctccttgttcttgacaaggaggagttgctcctgcccagaatgagcgtgacacttccgaacacttcttcatattcagttccaagatatatctgcttgattaaacatgagcttcctctgctctgaagctacctctgtcctcattttattctagccagaaaaggagtatcaccctagtgattatggctgttcactttcccatctatcttcctaaatctggaagttcttctcttggagatcaagagaaaaattacaattgtattccttactttattcacccacctatgaaaacaggaagcaataggaaaaaaaatccggttactccattttagcttttggtgaacgatgtagagcaaattgtctctctggtctaggtccgattactcttacctgtttttccactttgagacattctaaacagaatgtgtaacttctcatatgtatgcctctcccatctgtgaacctaggccaaagttgcaaaaacaatcatattaatagtagagtagagaaaaagttagtctatggttctcaaccctcgtgtacattggaaccatctgggagctgtgaacactgtcgctgccaatgttccagccaccagagatttggatttaactggtggggcctaggaattggtgtttttttgttttgttttgttttttacacaccttcatgtgattctgatgtgaagctgggttcagaacacttatctagtaccttctaaagagaactgacttaaatttactttcttttgaacatttgcagggagtaacatgccattgcagaaagtaacaaaaacaggtcctatttctttccctgtcctcatcagtggaaatctctttgtcactctgagagaaggcatgtacctgggatactgataggaagtgtagaacaccttttccccagagaagcaatattttgcactgttattaaatatcttacacggtaaagtcaaaagaatgacctgatagcctcacaagactaaattttagagcatggttttgtttttggaaaactgtgttgtaagtgccaatcaaccaacttttgaaaaaatcaagatacctaaactatatataaatggggagtattctgtacatatagacttatatataaagacatctgtgttcacggatgaccctcaaaatagttaatgccccaccagcatagaccatctgaatatcagccctgtctacacctatcaatgtattacaaaatcagtatagctctacaaaagagatcatgcttatttccccagatgtatttgattttgtatcatataattgtccatgttataatttttgaaaatgtttattaaaatagccatcttttttgatattattggtttaagaggtgtgccaaaaaaagtaatatgcataacttttaagactattaccctatgtttgtacgtatgagtgaatattgcccaccagagtagccatcttgagagactacatatttatattcataatgctattaaattatttttgccactcctctttcagaaaaggctttagaatccactccctcctctgagatgtgtgtcatcatttgagaattcttacttaggttttgttgttgtttgttttgctttttacaaaaatccttagcagatgtttccctctttgatttacctgccttgtttatcagattttgcacaaagttgtgtttgacaatttctagaagttaaatcttccctcagagctggagttttagcatcattgactctttgtaaaacgccatgtcatgggctctgaagataatttcaaatgaagatttccacaccccgcccccaccacccctgcccaaagtgcatgattatttttaaccagagtcattcttccaccagaataagtgtaatctcccaaaatgactactttgaaggagatagaacccccataaaggtatatgtttgttgataaaatatcaggtcatcacggattttgcaagtgaaagtcacctatcttctatgattgaaggtcctgatgtgggggaataatctattttttctaaagactgtgtttggtcacactgatttaatcagaacaaatgggttaaataagcagcttttatcacagttaagccatctgaaatggaaacgagtatgtatgggcatggcttgaaattgtttgtattttacagttcttgtatatccttcaagcctaacaaaaaattgtatgtgccagagattcctaaactttctgtgttcagggtgccattagttgtcttggtacttttttcatggtgccccaggtcaaaatatatacttaatagttcagtgttttaagtaattaggtcccaacagcttaataatagcagtttgcacagtgtcctgcatatatcactatatttcccttaaaaatttccagcattggctgagcatggtgactcacgcctgtaatcccagcactttgggaggctgaggcaggtggatcacctcaggtcaggaatttgagaccagcctgactaacatgatgaaaccccgtctctactaaaaatacaaaattagctgggcatggtggcacatgcctgtaatcccagctactcaggaggctgaggcaggagaattgcttgaacccgggaggcggaggttgcagtgagccgacatcgtgtcagtgcactccagcctgggcaacaagagcaaaacttcatctcaaaaaaaaaaaaaaaaaatgtacaacatcttgcttagcctgtgtgtgttctgtggtaccttggaatagctcagtacataatttggggaccacagatatctattatgccaatgtttgcactgtctgctgttggtgaccctcaaaatgaaattcttggccactcaactctccacattatttcactctttgttttgttattattagtattcttcttgcttgccattggctaattcattttttaactgcaaccctactcttctttgctgttcatcagccctgcaatgccgtagtgtcttagtctagaaaaatgcaatactcaaaagccccagcattggaggaggctggtgctaagatggacagggttcctgatttctctcattgaacttgatttagtgtcttgggaattataatctcaaaggaggcagagaggggttaatgttgcataatttatcactaaaatgtctttgttgaccaaggggctttattaattatgctcagagaaacaattctgtttctcttaaaagtgtctaacaaaacacttttttctttggcctgaaaggacaatggatacctagttcctaatttcctacccaaatgctgttttggctgtgttactccctctgccctcgaagctaagatttatatatttacaaaatttattggagctggtagtcagatctagtaaaatggattaaatgtcaattgtgctgggattttgccttaacatctatctatgacttgaagagggatttgttggctcaaaggatcttctgcttttaatgaattagcaagtgaaaaggtatttgaataaatgtcaacttcataggactttttttttttttaacttttcaaatggaaggtgcagttttcaattaggcctctgaaaatttacatagtcagatggaaaaatgccagagtaaaatctaggaagaaggagctaccagacccgatagaatagaaagaaagctattttattctcggaggtctatgttcctcttgtgtttgagtgcctctagcactgttaaatgtgctgacagctaaagatgctctttgggttttttttttggctttaatttgggtactatggattcttttgggaatttgttgaaagctaggaccttttccccaggaaaatttacattgtatatgaagcacataattttgcaaactttttttggttgttgttgggagggggttgcagtttatatactccacggggttagtagctctgttctgtagaatattgactgtgacatcctagaccacggttggcaaactttttctgtataggaccagatagtaaatatttttggctttgtgtgttataccatctctgtcacagttactcagctctgctgttgtatcatgaaagcatctatacgcaatacacaaatgaatgagcctggtggctgtgttccaataaaactttatttacaaaccaagcaatgggccaaatttggcccacaggccatggtttgccaacaccagtcttagagcattaaatataaaactctgattaactagatatgtagagttcttccattttagtgactattgagctcagctgctgttgaggcagattaggaagatggacataggaaactggattcagaaaggatgaggactgtttagtcccatgaaagttgcttgttaatgtcctcaggtaagtatgaattgttctggaagctgatagaacaattttcttcagatcaaactgaagtacttactttttccatttctatgcaatcaccaacataatttacttcaatttggaaataaatgtcacagttctcttagttgttaactgtatccttggcttaggttatttgcattttctttctttctttctgtagtgtggtttatacacaaggagaatcacgaacccagacactagtcaatctctctattccctgacttgtactgagattggggaatttgggaggtcagacttacctcaaacgtagaagaaggcagatagagttcttaacctttttcaacttagccacctcaattatttgttcacattttaaggaagtaggaaagagtagtttgaagtcacaaaatttgttctcaggtgttcttaaagctccctgttctcactgcgacagaagactcaggcctactcattttgtgctgtcccacaaaagtgagaggagtacttctctttttttaaatcatcagtaaatttcaattttaaggggcctatgcaaaatgcctcctttctgatgtgattttcttgggttgctggccctagttgaatttatgggccctgaagcctctagtggaaatcttgtcttccctatagaacgagaacagctatgtaatttgcttcaccttctgttaggacttgcaccctctttgccatacagaatgctataaaaaggacagtctgccagtgaccgaagctttctcatttttttttcttccagaacaatagcacacatcttggttaaagctatagtctccttattattcagaaatattctttttcctgctgcaccattaggcaaacatacattatgcttagaatgatacttggaaactccttaacagggcatattgaagtatttgatccagcaacttacctaaaagaatgtttgctcttcacctagggaaataaaacctgaatttcagagccttcaaaatgaaattatccttccaggggaagcacattgccaccaaatacatcactcactacctgttcctggtgactacatagaagatgtgttatttttctgaggtttagaaagtcactgtttacagctatgcaaatattgtactattacagatttttctaatgaagtagtttgaaatcaaggctttagtggaaggtaatcttttcagtttctgacccagatttctttttcaagcaaaactcctctgaaagcctctttgctatagaggtgatgaaggcacttgctagcctaagcagaaacataaagtaaaaaattttgtagtagggaatttttgttggtaagaaatcagtatcatcttgtaacacaaacacgtgttaatagaacttaaaaatactcagcctaattccttgggactttcagtatcttgacatcacttgtattatcatttgaacttggacattgagccctttatttttgggagtttacagttaaattttggaagaattgtgttgtatttctttcttagatgttgtcagtatgaacagaatttttttgtgaacagttaatcttgatgtgctccatagctttctccagtttacacttttgcatttctgagattcagggtctttttcaaggaaggaggctaatgtttaaggcctggaggctgaattcagggagcgtattggcaagtttaggcacttacttgtgtcttaatgtgggaaacagaactttctaagtaatctctggagtttgtagcttagaccaggccttcaaaagtcttttctgttttcctttgctacaatttgcttgttatttctctgccggtcacagatgacctggactgactgaatgcttttgtggtaaggaactgatctggccattttcatataacaaaaatcaaagtcaacaattttgtatcaggctgcctaaatgaaccctattgtttccagttcttaaaaatttaagggctatctaagaaaagtttaagcaaaaccctcattccaaacatgcgaccttataataagaacttcctttaaagatgagcagcaaggttgggtatctgatttcactaagtaatattctattgtggtcagaaatgggtaatttgcatcatttggtcactatcaatatttgtgttggagtctgcaagatatttcaacaaagtaagccaaaccactatcttaggggattgttgctggactttggaatataaggctgaacagtgatgtgaagtcatgtttgggggctggaagaagtgataaatgcaaaggttggtgctaaattaggaaccccttgaaggagcaagctgattaaaaaaaaaagctggcagacaagtatatcttttaatttatttgcagtgttgctatattatagagatgatttcctatgggaaaacccatcaaaaagccaaacctttattgttatttttccttaaaaatactgagctataagaagattcagagagtggcattaatttgggcatcagaacattttcttttgtatccctagtgttattgatttgaaagagttaccttttcagacagatggctgaacaaaagtaaatgattaacgggaaatttgatggttgagaaaaaggaacgatatgcctaaagcattttgagaatatacccctcatccatcagccacctctgggtaaagaaacacaaataccaaagcctgagctccttaaccttttgttccagagggcagacatttttaagaaaggtgaatgttagagaaggttacctgatgagcaagcttctttcccataattcagagaactgtgaatgtacttagaaatacactacaggtcttcaccagatgaactagattttataattttaaaatataatactgaaagctagtttgaagtttcagaagccatgaattatggggaaggagtagttttttattttattttatttttctgatctcaagttgtttgtcctgttgtatgttcaatacttggggagataagagcgaggtacagctgtggttttcagaccatattcagtggtgcccctgagggtctcttgtgaacagaagggaaaaagagtgtgatgaaggtgaactctgcctatctgaacctctgtcaacctccagtcagaatatctggcttctagtattgttccttttaactggaagtctctgtggccattaaaaacttgggaacgttggattaaatgaccactttaggactttaaacagtctcaaatatgggaaattttatagccaaccacggctgtgagtccctggcttttgccgtactgagtatgctcacagagatagggagataggtggccagaagacagggtcatttaattttaattgagcataaatcattttgaaagaaaaatgcaaggaattgttgtatgacagccatgcattatagatccttacatgcgacattttcctaaagtggttgagaatgacctgatctttgttcaccgtctcagtgacaaggcgtggagtgactgggctcttcatatgcagtggaatttttgcatctctaggtttgcagaggcaggagttaccgtttttgttcattgacctatcagaaaaaagcaaatcctttggacaatgttgacacagacaggggtacggtctgagactcaagctaacagagctaccccttgctgccttttgcaaaggtgttgtaggtggagaagggtaatggaaacctggtacagcctttagaagttggaagctatggtggtgtatctgtcatgaactgcacacaagggaatgcttaaacaccagctgagtcatatcaggtgccttgtacacacacataaagagtctggtgaattctgacagtgttctgtttgccactagagcaaatttaatagctggggtttcacagcaactgttttagaaaactatatgtgccaaaaatttacattgggcagcagtttatagtgttcttggccaatctgcataaaagccacttgaggaggtttgattaagaaaattgtgtttatctcctgtattacctctgtgtttgatttattctttagtctcaaatttattttctgagtggactgattttctatatgaactgaaatgatgttttaatagaataataggtatttttagaggaaaagtatttttttgtgtaatttgcttacacaactaggacatacttcctatgatactgaatcatcaaattgagtcatttaaagctgaaagaggtgttaggaatgtagtttcacattatttaaatacatgaacagttttctatatattttgtgaaaatcttgatgagacactagaatttctttatggaattgaactttacaagaattttaataaaagaggtggatttcttcagctttctttgtgcttcagtttcatagctgaaaatgctgcttccgtttattaatatggactttgtaaggaaacacaacaacacgttttcttaccttctgtaaattttgtgatagacacatgttatttgtatatatgattgattgtttgcctgttgcaccctaaagttattttcaaaccatgtttattgcaaagagagcctttgggcaagtggaaaatgccctgatgctagaatgaggtagttccataagctagttaggagcttgctacctcttcttggtacctgaaatattctgaaaggatatcggagaggtcctatgcacccctgtctttcaaaacccacctccagcacttcaaagtagtgtctctggagagtttaaaataaaagaatgaatgctattcagtggattccctcattgaggctcccatctttcctgccaggtgcagctttttctggttggaatcatctcttctttacggattgccgcattgtctctttgtgaatgaggcaggctgaactgtagagcatgaaactcattagaagtttataaagtaaagacctgtaaagcatgtgggtggaatgtttccatgctcttgaggtgaatattaaatttaaattctggcctttgggaactctttgcttgtgagctgaagaaggaaagaaggagttgggggtgtatatctaactgtgtttttctatatggaaatatatgagcatcaagtgataacttcaataaggcctcaggattgtatttaaaatacctgttttgtgggacagcatgcctttgttttctttgcctgttggctttggtggctccaaacattttcattttaggctagctttcctgtcacccaggttgtgtgcattttttttttcatttgaactattgtttatcattattaatgatgttatctccaaatcccaaagccaaggaaatagccagtatgcaggacttgcagtagatataagcattggtgttaacataggttaagttttgttagtgttcccagaaatatactgaattgagggataatgtagctttaaagaaattatgtttctttttaacatttggagaagccacctgtcctgggtccctattcttgagaaattcatcttttcatgcaaataacattgatgggggacaagactggatgattgacttctatcagtcagtagacaaggaagtataataattgccaaaggtgagggtaattttgccttacaagtatgtaggtcattctgtggtgggatttcccatcacatctagtaaaaaacaaccttttcatttccctcctttctaatccaagatcatatttttaaaaagtaggtttctgatgtgccatgaaatatttctgtgaatctgtgtttttgaccaaggaaacagctgagatattaaaccatgtggttgttccacggttcatctggctaccgttctgggtcccctctgaccacctcaaaaagaaaatgaaattgggagattaaatcaagcttgacctcctcttttaatgaggaactttcacgttgacttcctatctcaggatattcttcagtttcatactgctgaggagaaaggaacaagctgcagacactgtaactggtctccagatgtgtgtatatgcgtgtaaaacttcacaccgtgtgtgttgtgttcaatgttgtgtcaatctacaaactgactcaaacaacagtttaacgatagagaagacagtgataatggcaaaaaaaacacccaaccacctttttccgtcaaagtgcttgctatggctttcatagctgggacaagtaacattaagtattcaggagcaaagtgttcttgaaagaaaatggtgtgttgatctcataagaaaatgtacaaccaataaaagacattttaaaaagcgtagtgagtctgtacattaattgagttgttggaaaccctatattccaggaacatggtataaaaggctctcccggtaaaagctttcctggactatatattcttgttattctttctctatgcttttcctatttctaccaccgcacttcccaaacagactagaacaaaacctaacaacacaacagtattgcagtcgtattagtctgttttcatgctgctgataaaaacataactgagactgtgcaattaacgaaagaaagtggtttaatgtactcacagttccacgtggctggggaggcttcacaatcacagtgtaagacgaaaggcatgtctcaacatggtggtagacaagaggagagagagagcccagcaaaagggtaacccctcataagaccctcaaatctcttgagacttactcactctcatgagaacagtatgagggaaactgcctccatgattcaattatctcccactgggtccctcccacaacacatgggaattatgggagctaaaataatttgggtggggacacagccaaaccatatcagccgccctgaagactcattagaaaatcatttcaaggccaagcgtggtggctcacacctgtagtcctagcactttgggaggcagaggcaggcagattgcctgagctcaggagtttgaggccagcccaggccacatggcaaaaccccatctctgctaaaaatacaaaaaattatctgggtgtggtggtgcacatctgtaatcccagctacttgagaggctgaggcacaagaattgcttaaacctgagaggcggaggttgttgcagtgagcagagatcatgccactgaactccagcctggatgacagagtgagactctgtctcaaaaaaaaaaaaaaaaaaaaaaaaaaaaaaatcatttctagtctacttcagactcaatatatttgtttttttttttttcttccccaagacagagtcttgtttggtcgcccagagctggagtgcaatggcgcgatcttggctcactgcaacctccgcctcctgggttcaggcaattctcctgcctcagcctcttgagtagctgggattacaggcatgtgccaccacccctggctaatttttgtatttttagtagagacagggtttcaccatgttggccaggcttgtctcgaactcctgacctcatgatacgcctgcctcggcctcccaaagtgctgggattacaggtgtgagccaccgtgcccagcctcagactcaatattattataggcagcctaggttggaagtgaaggccaagattttattattaaaatcagatggcttttggtgaggatgagtccagatggatcaaatgaaaagattaagaccaactgtcttttggcttccatgtgttgctgacactgaactatggggccaaactagtcattcaagtttttcctggtcctataggtgtaatattaggatatttgctttacgtgatcagtcagtgccatgatccagatgttctgggaaagaaaatcttagtacaagtaaatatggttgtacttagtacaagtaaatatagttgtacttagtacaagtaaatatagtacaaggcacagttctctgatttctcctataaatggagggactagatccatttgacttgtatccatattaatccagtttagagaaaaattgctagacctgagtgttcctgtttgagtggatcaccagttataccaggaagcacacatttatctctagcttgctgcttttgtttttctcaaacttttttttaattttatttttattttaagttccagggtacatgtgaagggtgtgcaggtttgttacacaggtaaactgtgtgccatggtgatttgctgcacctatcaaccttccacctagatattaagcccagcatgcattagctatttttcctaatgttcttcctccccccaccccctacttcccagcttagtgtgtgttgttcccctccctgtgtccttgtgttctcattgttcagctcccacttatgagtaagaacacgcggtgtttggttttctgttcctgtgttagtttgctgaggataatgacttccagctccatccatgtccctgcaaaggacatgatttcattccttgttatggctgcatgatattttgtggtgtatatgtgccacattttctttatccattctatcattgatgggcatttgggttgattccatgtcattgctattgtgaatagtgctgcagtgaacatatgcgtgcatatatttttgtaaaagaatgatttatattcctttggttgtatatccagtaatgggattctagtttgcttcttaaacagactgatgctgctgaatcagaagtagatttttaaaaagcccttggtgtttcacgtcagatttaaatcatttcaagagttagaatccaaaggagagggctcactctacttctgtgtacgttactcaaatgacttcccagggaccatgaactctattatgctgactttggagtccttctcccctaaactgtatcaagactgtcataatccttcatcattcttaagtgacaggccttccttgacattacaaattttaagttcctataagggtgcaggtatgtggagagggagggcatgaacaaacatgattctcagacatcacatgtgaaggttattttatccacttctccacagccattcttgatttttatataattagattttgaagtatttttcttttgatttggataattccatcttttcccctcctcatgttgactgatactaatttgccccatcagaatgattccctgtttactcaagattttgtaggaaactgaattaaagtagaaaatggagaaaggaaattgggttaataacaaaagcattttggggttgtttcttgatgttttgattatgtacttaaacacagcaaacccaaaaacttagtagcttaaaacaacagtttattactgacaatcttgagggttgactgggctcagctgagtggttttgtttggtgtttctcatgcatgtgttgtcagatggtggctggggtgagagtcttggagggctttgtccatcacatgtctggtgtctggaccaggggagctggaatatccaggggccagtggagcatctcttgcttcatgtggcctctctatatggctagattgggttgctcatagcctgggcatctcatagtagttgcaattctttcatggaagttgtacttccccagctttagtgatacagaaggcccacacagaagctccaagttaatcacacagtgtaatttccactgtgaatagttggaggttatgcttcatggtgaggatgtctgaaaactaattaccatgcttggttagtctaatacagttagaatatgccagtaaactttaaaatctgatcttattcctactttccaaaattggtggccaagaggcagtggaaacgatgtattaaaatcaatgatgaaagtggaaaaacagtattaaaattaatattaaaatttgtttccatttatttattatctacagttttgtcaaagaaagcactttgatcaaaataatcttatcctacagagggtaaattggccatctctgcctgaaagacttaagccatagttggaattaaaatgacacagaagagaattaaacattgacacaaatgactcacaaatctcctatctatacttccccaccaccccagacggtcatggttcataaatacttgctgagtaggtgtttttcctccaaatgaagatagctttgttttgtatttttgaaataatacattctgagaaaacctagagaatacatacagggaaataaacattttctacgattctgagttaattgtttgtttctgtgtttttttttttttttttttcgagatggagtcttgctctgtcgcccagcctggagtgcaatggtgcgatctcggctcactgcaacctccacctcccaggttcaagtgatcctcctgcctcagcctcacaagtagcagggattaaagacatgtgccaccacgcccagctaatttttgtatttttagtagagacagggttttaccatgttgcccaggctgttctcgaactcctgacctcaggtgatccgcctgcctcagcctcccaaagtgctgagatacaggtgtgtgccactgcgcctggccaagttaattgtttatgcacttaaaaatatattactccataaaataatgtcttttacaacaacttggatggagctggaggccgttattccaagtgaattaactcaggaatggaaaaccaaatattgtatattcccacttataagtgggagctaaactatgagaatacaaaggcataataatgatataatggactttggggacttggaggggaagtgtgggaggggcttgagggataaaagactacatcttgggtatagtgtacactgcttgggtgacagatgcatcaaaatcccagaaatcaccactaaagaatgtatccttgtaaccaaaacccatctgcacccccaaaatattgaagtaaaaattaaaattatatatatatagttctgtatatgtttccctaaaacacaaacacacatacacattttaactactcctccatggtgaaagttttgattatttccttttgattgttctgaaaaatattcttacatctttatacaccagtctaattgttttggagaggttttaaagagctgaaggacctcaaccactttccccagggctgaacaccagcaatattttgcttgtctcaacgcagctctttccttccatttttgtggtgcctatgcctacccacttccaggtccagctttaacatagagaaaagatttgcctggcaataaaccaaaatcaggaatttgcagtgctagaatttgcccacataatcatgtcctcctggtcctaaagctgtattccttgagtacaatagagtataagcaatgtctttcagaaatgcccacataggaacaaatgttccgcaagaaacacttgaaagaaaagtacagggcataggaacagagaaatggaatctgccaccgagaagcaaaaggttgcccgagaagcaaaaggttgccttttttaaactagcagtttttgtttaatgagtacatcaagccagtaagaagcaagcagagaatttccagtttgactggttcacactctacccgcttaaagccacgtaagtctacatgaagctagagctagaactctgcaaaaacaaacaaaaaccaccaccaccaacaaaaaaccaacgaaaaaaacaacctaaaaaagcccaaacccagtcatcacttactcaatggtcattagccctagaaaccctttccagatatggcacagctattctagtttattaaaaaataaattttattgtgtatatttaaagtatacaacatgatgttataagatacatgtagtttgtttttttatttttattttattatactttaagttctagggtacatttgcacaacgtgcaggtttgtcacatatgtatacatgtgccatgttggtgtgctgcacccattaactcgtcatttacattaggtatgtctcctaatgccatccctcccccgtccccccaccccacgacaggcccggtgtgtgatgttccccttcctgtgtccaagtgttctcattgttcaattcccacctatgagtgagaacatgtggtgtttggttttttgtccttgcgatagtttgctgagaatgatggtttccagcttcatccatgtccctataaaggacatgaactcatccttttttatggctgcatagtattccatggtgtatatgtgccacattttcttaatccagtctatcattgagggacatttgggttggttccaagtctttgctcttgtgaatagtgtcgcaataaacatacgtgtgcaaggatacatgtagtttaaaaaggttactatggtgaagcaaattaacatgcacatcatgtcacataatgacccaatttttttttttggttttgtgtaaagagcagctaaaatctgcacattgggcgtgaatcatattttgttacctatagtcctcatgttgtttgagaagctctacacggtcctgaaacttgccttctccatccttgtacatcaacgctgcagcatcattgcaatcacctgggagctcattaacaatacagagaagaatctggagttcaacaccatccccaggtgattcgtattcaaatgatagcttaagaagtgctggtctattcgtctcatccagctgtgaatgtttgattgtcagacctcagttgttactgcaatacttttgatatttaccctgtgttacagacaaaaggtgcttctggtggtgttagatgtataaagtacagtatctatattcgatggaaggatttttgtgttaaagtgtatttaagtgtatttgcactctaatgttgggttaaatgccacatttttcttttttcttttctttttgttgagatggagtctcactctgttgcccaggctggagtgcagtggcacagtctccgctcactgcagcctctgctgcttcccgggttcaagtgattctcgtgtctcagcctcctgagtagctgggaacacaggtgtgtgccaccatgcctggctaatttttctatttttagtagagatgaggtttcaccatgtgggcctcaactcctgaccgcaggtgatccacccacctcagccttccaaagtgatgggatcacaggtgtgagccaccgcacccggcctctttttttttttcttttaaattgtagagttattgaaaagaagtaatgggaaggagaaaaggtgacccttatccttgcatacatttatatcagttgtagataaaattattttatagattcaaatttaatgctgttttagggatgcaaaacattgtgtaggcttcatagcgaaggaagtctaggagatagtgacctcaaagcttagagatgatctaaaagaatgctgcttttgctctctccaaattcaggaaatttctggtattgtctgagacttaatgtgccccaccttgggtccttggagttccttgcactgacagtctggtcaaaaacttccttggcaagtggtggctctctgtcctccaaggagagacaagaggcagacttggaacatgatgctatttgcctaaaagtaatcagctcagctcagagcattttcctatgatccagaatgaccctgcagactggaaggcgaagagttgttcttagacaagaacttgctaaaccacttgacctttcaacagctgcagaactgtttatcaggagcatgccatctctcttggctcttgcaatttggcagccagaaaagtcaagccagtgacatcgtgtgctttagaaaacttctggacaattcacaacttccaccataaagtggctaaattagtcttgctagtcagatagtgatctttggatgggtcatcctttccttgagctggttggcttttgggactccttcactggaatcaaatgagtcactgctggagataaacataaatatctatttgccagagcctccaattccctaaatcgtagctgatagagaaggatagattagctctgtttccagacacaagcctagggcaagtggcaactctgtttgccaataacaaagaacatgaattctcttcatttatctaagtaatttctcaagaatcaaaggagccagtgagctttaatttagtttctctgacagttgtatttgtgtgcagaaacatccatgattcatgacatacttttgcataatatgagttgaaatatgacttgataatgctaataaaatgggtgaataataatttcaaaacaatgacactggttgaaaactcactcaacaagagatggagctcctgttgatactgaaacaaggaagggccaggcacggtggctcacccctgtaatcccagcaatttcggaagctgaggtgggaggatctcttgagcccaggagttcgagaccagtctgggcaacatggcaaaaccctgtctctaaaacaaaatacaaaaaaattgaccaggcatggtgtcatgtgcctgtagtcgcagctgctggcggaggctgaggtgggaggatcgcttgaggccagggaggtcaaggctgctgtgagcagtgatcatgccactgcactccagcctggacaggagacagagtaagaccctgtctaaaaaaaaaaaagtaaaagggaataggtctccagtctagagctacagccaagtatggtgtttaaaatcttggacacatgtcttaagctctctgtgcccccaatttattcctccttaaaatggagataatcataagaactactttagaattcttataagaattaaataaaatatcatctgtaagtgtaagcacttagtgtcggccacatcattgtcactcaatacatttttcttagtattatcctctaatcaaaccccttttgcaacaaatgtgattaaacaaatatgtatgtaaaggaaagataacccagcaattttaagtatgaaggtattttagaccctcaagcccaataatacttggcttttgttggctgaacgtgtcagagcttacatttgagccacatctcaatgtttcgaaaaaatgttcgtatttttcagtttgtatattacactaaaaactttgttcaccctctcatgtaagtgatagggctaatttgtttttcctattgcaaatcctgtattatgagattaaaacagtgacaaccacttttgaaatagcaaatgcaatgtatattgaaaaacattttcagggtattcattaagattgagatataatacatcagaaaaagaggcagactcaatatttgctttttttttttttttttttttttttttttttttttttttaacagagattaggccactgatgctaaaacactatagattgctgggctatgctttaaatactgaatacacacaaataatttctttttctttttttttttttttttggagacagagtcttcctttgtcacccaggttggagtgcagtggtgcaatctcggctcactgcaacctccacctcccaggttcaagcaattctcctgcctcagcctcctgagtagctgggactgcaggtgcacaccaccacgcccggctgattttttgtatttttagtagagatggggtttcgccatgttggccacgctggtctcgaactcctgtcctcaagtgctccacctgccttggcctcccaaagtgctgggattacaggcgtgagccaccgtgtccgacctcaaatatttttaaataaactttttttttcaaatttatcaaatacttgagaaaggatttcatgtggatttgaggcttaaaagacatatatactttgctattctactgatacggtttggctgtgtccccactcggatctcatcttgaattgtagctccagtattcccacctgttgtaggagggacctggtgggaggtaattgaatcacgggggcagtttccctcatactgttctcatgacggcgagtaagtctcacgagatctgatggttttataaggggtctttcctttcacttggctttcattctttcctgcctgccatgatgtaagacgttcctttcaccttccactatgattgtgaggcctctccagccacgtggaactgtgagtccattaaacatctttttctttataaattacccagtcttgggtatgtctttatcagcagcatgaaaatggactaatacgctaactttattctcagagaaagcacaaagcatatgtcagtagaaagtgtgtcgtgtttggcgccacccatacctgggttcgaatctgtgctctactgcctaatagcttttggggtcgagaataaattccttccttccttccttcctttctctctctgtttgtctctctttctctctctctgtctcttggtctctcggtctctctctgtctctctctctctctctttctttcttttttttttcttttttttggcggagtctcgctctgtcgcccagactggagtgcagtggcgcgatctcggctcactgcaagctccgcctcccgggttcccgccattctcctgcctcagcctccggagtagctgggactacaggcgcccgccactgcgcccggctaatttttgtatttttagtgagacgcggtttcaccgtgttagccaggatggtctcgatttcctgacctcatgatctgcccgcctcggcctcccaaagtgctgggattacaggcgtgagccaccgcgcccggccgaggataaatttcttaaacgttctaagcctcagttttcaacctaaaataagagaaaggattaagaactgtatggaagagaggggagtggaaattgtaagaagtaaagaatctggcaccgtgcctgtcacaggcaggcaaacctccctttgcaggtgatgatcttagttatcatggaaccatggaacaccgttcccttgtgtgtgcgtttcagttatgcacatttctgcacgtgttgcaacatgcagaacaacaaaatctataaaaagtttttaatatatggcagttttataatttcaatatattaaaaatgtcaataagaaaatataacattttggttgggagcggtggctcacgcctgtaatcccaggactttgggaggcagaggtgggtggatcacctgagatcaggagtttgagaccatccatggtgaaatctcatctctactaaaaatgcaaaaataagccgggcgtggtggcggatgcctgtaatcccagctactcaggaggctgaggcaggagaatcacttgaatctgggaggtggaggctgcagtgagctgagatcgcgccactgcactccagcctgggtgacagagcaagactctgtctcaaaaatgaaaaattaaaaaaaagaaaatataacatttcactttaaaaggaaacatctgaaacaacaataaaattaatgactgagcattgtttcatttaatccttaaaaaattgtcaacaaggcaagaaccgttactgacaccctttctacaactggagaaaaggagacccggaggttcaataaccaagtttacccagctagtcaacagacgagccagacagatagagaggggctaacctctctatcttgtctcttttggatttgtgttaaaacaaagacaaggttttctcactttcttgaccctgagactacgtttttgggctttccgttttgcaggagaagcaatgttttatatgggccaatgtggggagatggataagctgggactttggtactctggatgatccagaaaggcagagcaaatcattgaggatcaaactccagagcaaattattgaggaccaaatcccataaggggtcaggaccagctcagccagttcaactgcagaggcgttgcaaagggtagaattaggagactcagttggatgggcaggtagtattccagtggacatcggggaagatcaccaggacgtcagcaattgggcaggctttagggtgagctcttgttttgttagagtagggccaggcagaatagagacttggattttgatcaggactgagacagagtgtgcaaatagaaacttagaccagggaaccaacgtaagggagacagagaagagtaagtaggagacctgaacttttccctctatacttgatctcatataaaaatggcggtgaaggaatctacccatgtaacaaacttgtacatgcatcatgtgactctaaaatgaaagttgaagttactttaaaaaattgcagtggaggagatcatgggacatcgggccagacagaggcaacccagcggcccggcagtcaagatagtagggccgccaggtctgagagcagggctacaggccaactccccagcatgtaggggtggagaggggccagtcacagccacgactggcaggctgagactgagacctaaggtgaaagggactggcggagccaactaaggaaaggtaggggattgaggggctaggagccagaacctataaacttgagcttgtagcagtggcaacaaattctatttcccagctggagggaatggatgatcccatactgactccatgcaaagtgtaggacaagaggattgggaaaaagagatctctggccatgtgttcctcccttttgggaactccttaagaaatgtgaaaggtgagggctgtcacctggcacgatgtctttttccctttgaaacttgggggttgttgtaggcagcactgtccatgccattcaggtagagtgcaaaaaatcaggttcacttgttgaaaccagtagctatagagcatgtgaactacttttatgcctcaattcaaaggagcaaaagaaaggaattcattctctaagagccatgtcaaagacggattccaccattatttggaaatgcaatcatgcctctggactgaaaaagtacccagttaggtttagctcctttaaatagttacagtgattcatgagatggcaacattttctaacatcagattggaagacctgtgaaggcaattctgtcctgatgaagacaggaaaacagcgtctgtgttctggatagtctggtgttagtgaatgaatgttttgtggtcagagtaagttatggaaaatgtaagtgtaataacttttgcatgtgaatagagctaaattataccaaacatttactaggtgtgtgtgaggtggcaggcagggggaggtgggacaaacctccactgaaattctacatgtgctctcttgttaatctgtaaaagactttcaggcattctcttatggaaacttcagaagcagatggaaatattttaagatttataatacacatgggcctgtaacatgaattttcattttccttacagaagtgaacccagtggagtgctgcattatccttcattagttagcaaaaatccaaaaggggaaatcatattttatactatggcttctagaaggtttagaagcaactgtctcatttgtgaacatgagcagcacaaaagctgtgcttcagttcttcccattgtatttccatggtcatgatctgcttcatatcaggtagatgataattctaaccttcgccaacaattcagctaatgcagcaaatttcttctcttcacccccaaaggaattatgtcttttgaggcaagaaattatcaagctcataggaaatggaataaccatcttttttcatcagaaaactgcatctctttcaaattgtaaaattacctttggtaacatatcctgattttaataatttactgagggtgtagtgcattctttaaatgatacatttatgttggtgtaccattagtgttgacagtaataatatctatgtaataaaatctataggcagtattctcatggacctatggctagggaaatcagactgttttgacatcaaaaaatcctgagtgaaatttgaatatggcatcccaagaatgacactttaggtgctcagctttgtacatccccatcaccacataataggaactgaaattttactctttccctcagcctggtggacctgtgttctttccatcaatgcaagcggcctcactggtgctgaatggacagctctggatagcattcagatcaaggtggccgtgggtgtctaggacccacggatggcttctaaggagctgtgagcctcataaaattaaatgcaaaattgcgtgtatatgattgtgtgcacattttcccaagaagatccatagcagtgaaaccttgcaaccaataaaattaaaggataaaatctattgctttactcctatcaaaagaaatgcaattttcataaagggtaccctaatatttacaaattatagtaatgtgccccatctcctatccagaccaggtaactaaatgattgtaacctgttaatacccaaacatccgtgtcaacttttccacaaagtaaaacaaggtctctgtatgcattgactacatattaaatataccttacattccttaaatgttttacaattataccttaataaattaacatataatatataggtatattacacttggtatatataatatacttcacatataccttatataataatttatattatgtgatactatattataatgtattaaatatataatatactatttaataatcataatcatatatattatttaacataatatattaacatatgcttaatatttaatatattagactagttatataaataatatatgatataactatattacatatagaatatattatttatatacttcatatataatatataacgacataaatatatagatatatattaatatatacttcatatataatgtattatatgtgagctattatatataatatataacaatatataatatagtaataaacttcggagaaaagaaatattctacattgtggaagtttatattatatatgatatatactatataagatatatattatattattatataatataatgcatatgaggtattatatagacttcatatatgttatatatgaagtatgttaatatataacaccttaataattatactttataacattttggctaatccaaaggcaatttatttcaaaacttagagtttactaacttaagtggaagtggaggagagtaaattttgacagaaaatggaacagcaaaaagttcttttcaaatgtttgattattgtttcatagtatataattgtagttccttacaatattagtttatctgtttcatatttcttggaaaaaaccctttaatgttaaggctcctatgtaggaattctttgatgagcgcggaaaagctggagtgaaggggttgataaatgtttaaattaacaaacttgattttaaactatccaataaatatttctcttaaaaagttaggcatattttgatcagtttggttcctgttttatttttttcctttcttgatccgcttctcagctgtggctgcgatctctggcatctccacagcattgatgaaaaaacccttttaaaatgactgtatcttgtgtcttgtgtggtcttctctcttctctctcaatttaaagtattaaaattgtttaacatctttctaggaagcaggtaacacaatggtaagtttacaatcttcctcctgtccctttgtatacaggggtcaatttatgttggtaatatggtgaatgatcaagctccaatattaaactttggagacaagtaatatcctaccttgtggaagtttgaattaaaagatctctttcaagtgcagttgagaatttagccataactctatcattcagagataaattaaaattcagtgtgctagtgtatgtgcatgttttacatcaaaggcaatggtaccaagaatgcatacttaaccttccgccgtgaggagtttgaattggaaaattttaatccaggttataaatcacttgagagacatttaaaatagccacaagggggcagcaaaacacacaggattccctgaatccactgacgcaggaacatttcgctgtgtcttacgaaggcaaacgaaagaacgaattaaagtacctggcgtttgagccgtcttcaaacactggcatttctagtaccaatacagtgaagccggcaggggagacgctatacttcctaactgaataatatatgagacaccaactttctaagtatttcttttctttttcttctttttttttttttttgagatggagtctcgctccctcacccaggctggagtgcagtggcgcgatctcagctcactgcaagctccgcctcccgggttcaagcgattcgcctgcctcagcctccggagtagctgggattacgggcacccgccatcacgcctagctaatttttgtatttttagtagagtcgtggggagggttcaccatgttggtcaggctgctctcgaactcctgacctcaggtgatccatccgcctcggcctcccaaagtgctgggattacaggcctgagccacgtgcccggcccctttctaagtatttcttatgaagggctactgtgatttgcacccagggagggcgaaaacctgtcagtggctcatgatacttaccagtggagcagattgtaaattcctcttcctccttctcctataaagatttctctgtattccaggggcaaataacaataggtaaagtatcagttagatttaacttttaaaaataagaaacagaccctcttgcagaagcagtaaatacttatgaatcacttatcaattatcaggcactgttccacagggaagagtccagggtactggtcgaacctggattttattgtcaggctttcttggtgtgaaactgtacaagctcgggcagatttcttcgcctttagatgtcttagtttcttcacttgtaagatgaggctaattctataggttgctttaaagattaagtaaaataatatatgccagctcagtggctgacatatgataagaattgaattaacagttataaaattactatcatacatgagtggcatgtggtattactcagtattgtttcttggtaactaaatgattatatgtaatttcatttaattcttacaactagtgtgagagaccagttttatttctctccatttttataggtgagaagttgaggttcaaaaggactgattgcctaatataaataaaacggaaaagctaggatttgaacctatcgtttttctgactcccagactcaggtactttcaaccacacctgtgtaggtaggctaccatcatatttttccccctcttcctggtaactcctaaagtcacctgaagtcacctaatagatcttggaatgagttagaagttccactaggccagcacaaggcaggatcgcatgagtcttctcatgcactaatcagaccagggtgtggggacggaggagaggaaagactttctagtaatcatggaggaagcaagtattacccccatgtctcaaacccaaatcagtctcacctggaaaaatctctccaaggcaacataccttaaactcatgagcacttatttgtgtatctcctacatcatcgagtgtcatccttgtctatgggggcaagtgattgttgaaatgagttgactcatctatggtgaagagctatatggatgtctggaatcagaatgttcccgaggtttttaagtcttgaaataatcatttaagtgcatagaatttgttctatttgctctctctcaatatggaaatggaaagacccttctttgcatgtttaattggagaaggcactcttacttaacaggcttacagaagcatgtcctcaccatgtgcactgagaaaccacactgaatacacttttaattattttattattattatttttgagacagagtctcactctgtcacccaggctggagtgcagtggcgcgatctcggcttgctgcaacctttacttcccgggttcaggcgatcctcatgcctcagcctcccgagtagctggcattacaggcatgtgccaccacacccagctaatttttgtatttttagtacagtcaggatttcatcatgttggccaggctagtctcgatctcccgacctcaggtgatccgcccacctcggccttccaaagtgctgggattacagacatgagccaccgcacctggctgtgaatgcactttttaaattaaaaatacaaacatacaaacaaaagaaaacaaaacaaaaaacaccctctctgtgtaaagcagcttaattatccaccaattctttgttattgtagagcagtagttacgcccctaagagagatgaccgcagagaattacaaagaaaaagcctgctgacctatatacatgcttattccttatttcaactgacaatatggaaatgatagaagatactccctttagtacctatggattttcccacgttcttttatagaaactttggggtccctcaagatgaaaaaaagctatcctcagatcctcacttactcctgtaatacagtgaacatcacagagtaaaacagagtctgagcaagatccctcttggtaaatagtctgctgctgagactgccccttggcacttggccactgtgacaccaatttcaaaaggttagatctaaatggcaaatgttcttaaaatatcctcttaattatctgttgactttaaaaatcatatttaacagtagtattcatttatgtcctaaatgggaattgtcttgtttttctctttggtgcccttgatattaaattgctgtggtttggggagaattctaagtggaccccgtttgttcttattgagggtgggccttgaggcacatactgactttctgtgaatttgtctgtctacagagcaaggggtctgggtgactgtgtcagaatgtggggtaaggtgtggcagtgtgtgggtggggattagaagcctccaacttgcctaggaacatctctccattctttattcttgagccagacttacaatctgaagagtactctctgcgtactttgaagaaggcgccatgatgtttcttggggcggtacacacttgcaaatgaaaagtcatattatacttggtagatttctcatcacttatggttatttaagcagatgagaaggaattctacaaaataagtacatagaaaggctgacgcgatggctcaatgcctgtaatcccagcactttgggaagccgaggcgggtggatcacgaggtcaggagattgagaccatcctggctaacatggtgaaacgctgtctttactaaaaatacaaaaattagccgagtgtggtggtgcatgcctgtaatcccagctactcaggaggctgaggcaggacaatcgcttgcagtgagctgagatcgcgccactgcactccagcctggtggcagagtgagactccatctcaaaaaaaaaaaaaaaaaagtacatagaatagtcagatatgaaaaaaggcacaaattatactttgtatagtgattcctctactcattcttgataaactgtagaatactgcttcccttgtcacacaatccttttaattaaaaaaaatgcaatgatatgcttgctgaatttttataaggaagattcttaggtcagcctttgacatggagacatgtactcgctgaatgaataaatcaagatagaaaaccttatttatttagccagaaatgtgctgtgcagctcttccctggagctcccagaatttcccagtagtggatctcatagaaagaattcacaggtgaagcttcagcagaaaaggaaccagaaagataatcactaatgttcttttcctcccctcccttcgtctcccctcccctcccctcctatccccttttttcccttcccttctcctcccctcccctctcctttccttccttctcctcctgtcccctttcttcctcccctcttccctcccctccctcccctctcctctcctccacgtccctccctctctttcccgttttctttcttatttcttcctctactccctcttcctcctcctttaagaaatgacataatttaagacactgctgcagatgatttaaaacatatatttaccttccttttttggatatgacctaaaaggaaaaagtgatgtaaaggaagaaaacgacaggttagaataactcctcctcctcctcttctggttataaagattggtctccagtagcataatatgaagggagctggagatgatctgctcagtgtcagggtggtgttatgtgcttgtctgaaaaatgaaaagatgatttaatcttgtgtatgtgttttaacaggattaacttcatgaccccatggagaaggggtagagtaaggatctcacaccagtggcctaaggaagtacaattatggaaactggagggtgtgtgctaactaccaaccagtccggaacttcagttgtgttcataagggtccacacaacaaccttcacccttgcccaggctgtaaacctcatctgggttattctgactctccatcctgaagttatttttcttccccagtgcagttgagaactctttcatcaggtcagcagggaaaggcatacgaagcaggataatctggaaatgtgctgggagaactctttttgtccatgagctaaacataccttaataaccttgcctttaaaacaacaaacaaacaagtaaaaagcatacataagaaccagaaacaaaatattaacaatgacaataaccaaactaaacaaaaacaaaaactatcttgtactgctccgggttgcaggtttttaacataactaagaaattgttattaaaataaaagatattcattgggaaaatgtagataagcaagtagaaaaagatgaaacacagtcttagcattcagaaataactctggttatattttttgggtttagactctcaaagtgtgtgtgtgtgtgtgtctttctctcctacacacaaccaatacaaatataaatttaccaaaatgaaaacatatttgctcttattactcttaataagcatactcattctttaataactgcaaaatatgtgatcatatgagtgtactatagtgaatgtaactggctattactactgtgtatgtaagatgtcttgcattttttctttcttataaattgctttataaaaattgttcttgtagccaagtgtttgtgacgttacaaatgtttacttaggataaattcctagaagcaggatttctatgttagaggttaaggacattctgaaagcttttgttgttaagtaatgcgaagacaccaagaggtctcacccacacattcttttgtcagcagtatatgagatgcctagattctcactactcctgagggtaatcattgaagttaaaggaaatacttaaaagtggatttttgaagaggaatgactaggcagtttaattctgccttttggaacattcagactttattgccagaccagtctttttcgggaattcacttgttaccaaatgacttagagtcacactgaaggctgaagcctataaaaggggtcacaccgatggtattgttcattcatttataagaaagatcacgtctttcttgctttattcaaaggagcggaagctggcttgcttccagctgggatatcctgattggaagtcaactcggacagtcagctttgctccttccttaccatcctcttagtgcaagttcctcaaagaagactgatgtgtacacagtctggtttgcacatatacaatgcatcaaacacatgatctgctttgctcatcctgtgtggctttggggtccaaggggaggggagaggaaagaggctgagaaaatgggcatttcttcctggtaagtccatatcaaagatcagtgtttggctcaccaacagctgctacactaattattcatcttaataacaatgagtaacgatgtttaaaaatcccgagtgcctatcaacactacatttagtgctatacaatatgcttagctcaaagtcctcattggacattttataatagcctttaaaataatacttacattttcaaagccctttaccgtggatgaagtgttttcatattgataagtgaatgtacgatgggtggtcagatttggtggtatttcatgctttttacctgtgtttgaatagtgctcaatttcaggccttctgactattccttctgtttcatgtctactgtttaaatccttacttaaaaaaaaccaatgatgggctcaaatctcttatcgtatttcttaatgggatgggataaaatgaaggatgtggttagctgtgatgacacatttaaataaatagaaaaaatagaaaagtcaatcatgtggcaagatatgctttcacttagtgccttgtcccctggaagtcaacatgaaaaagtgctctgggtcttggattagaaaaagccccaaacatctttcatgcatggctggaagtgtaagactcgttatcctggctctaatccagtgcaaaggggaatttcaagagctggttcacatatttgtaattttccagttttgagcatacacttcctatcctggccatttgtgctttctgggggaagccagcaaattgcttgtgcagagggaaaatgcttcttgatatcttaaaaccgtaaagtgctgtgggatatttttggataaagagttgagggagatcattaattttgtaaccactgtgttgtcattagcacagttctaggcttacaatgttttattagtgtggtttgcatgattagtttacttggagaattattataaattattgatgctatcattctgctgtggggaagcctagcgaactggaggaaataaaaaaggcatagattttgttgttgttgtttttaatcctagtttatgagctgcagtactcactaaagtgctttggaaatctactaaaaagtttgttaattcaggaaaaaagatactggttcagaggaccaccagaggaagcttcagggagcagaggggctccggaaggtctttaagcaggaaaatagtactatgagcaacaaactaccttgtttgattgaaatggagcattttctaagaagttgaaaggcaatggggtcaaaaagataaaactttttgtcatttagctaaaaagtttaagagtagctttcaagggccaggcgtggtggctcacgcctataatcccagcactttgacaggccaaggcgggcagatcacaaggtcaggagattgagaccatcctggctaacacggtaaaaccccgtctctactaaaaatacaaaaaaaaaaaaaaaaaaaaatcagccgggcatggtggcgggtgcctgtagtcccagctactcgggaggctgagtcaggagaatggcgtgaacctggtaggtggagcttgcagtgagccgagatcgtgccactgcattccagcctgggtgacaagagcgagactacgcctcaaataaaataaaataaaataaaataaaataaaataaaataaaataaaataaaataaaataactttcaagaagccagagctaagtgctaggagaaatctcccaagaagatggacacaggtgatgtatcctacatagtaagccacatggcccatcatggctgcttgctgcatgagaggctgcccttcttgcaactaaacatgacgaccatgactggccagaacccttgctggaggaaggagagaagagcagaaggcatttacataaaagatacatcaacacttctcattgtgaaaatataaaaataaacccaaagcccttgttggtggccgaccctcaatcctggcactgttgctggattgacttatccttctagatgagctatgctcttttgtgatttgggctttctgtaaatggtatcccactgcacacccaaacataaacgtgcttgtaacatgtcaagtatctcttgaagctctttctgtataagtatactcagaaccacttttaattttaaactgcagattgcatgttatagtaggatgtactctatatatgtggtcattctcctgtaaatagacagttaggtttttctgatgctgcctgccagatgagaacaatgttgtgggttccaggtgtttaatgtcagttattttctacccagtcaggtgaagaagtgatattccgcgaatgtctaaggttggctggccagcagagtttggacggttgaacacactttttggttctgcctctgcatgggtaagcgcgtaagacccgtgttgttgcttctacttagccttagaggaaaatgtcttaactacagtgttgagggaactatgttcccatcaggggacacctgcatttattccataggacagttacgttatgttaatatttttctgattttcctctcctttctgtaagggtaaaggaaaaaaaacttttaacctatgttttagacttcagtgagaaccctctcctatattcatactttcattacttttcagtagattcatagaaacatctatgtagacttaacagtttggccattagcttatggtaaagcttaggacatattcttcctagcctaaatgtgagtattcatttgtgatttaaatgactgtgttgcctttttgttttgtgacttagacagggctgataccggttatgggatgtgtgtattatcctagctcccataaaaggggctgattttcctactaaaatcattaaagaagcaaaacctattatgggaaataatgattagatcacaacatcctcgataaatagagaactggctagttaaaatgacctagttaaaaatgttaattttgttcatgggttttaaagttttatattcctgtttagcaggaagggagaatttatttaggactgaatggaagctattacaggtggtattattattatagagtaacccatgaagaaggatattttgtttaagccttcaatatcatacaatattaagtatttcataaacaataaaaataatcttttctctgttgactttggttactgatactatttgaaatagaataatgggttcagttcaggatatctgagagcaaagattacaagggaaaattgctgaagataaacccccctctcctgcaatctctaagggcagagtttatcttgtctggtctaactcatctgggaatttcagacctctgaaaaagttctgtttggagtgaatgattggccttgaattttgacctttataacagagataacttggattttttgggaaatttgatgatgatgtatagtgaattttcttatctgggaaagatgagtttttgaagtgttgttatggaatgggtctttctggaagagtctagttttgattcaagctagcttcccaaatgctgcttgaaatcataacatcttggagaatgcttgtactgctcttaagtaggcaggggatctttgcttattccctggcagcgatgtatggcatttccagttactcaggcttaggaaatagagcagttttctcccgcaggactcaactctgcactctgcaaaagaatggcctctttagggtactttggatttattgtgctagtttaagcaaggggcacttgactgggtatgatttactttgtgtttacaagagaaaaacaaataaacaaacttccgtctctattaggtaattgacaaatgtttatggagtgtttactgtgcactttcaattgtgccatgcccttttggggacataaaaataaattatcggaagtttctgaattactttccccccaaacaccattctcttctctaggcaggactttccatttaactgtacctaaaaatcccaagtcagataatttttgagattgtgtctgccttcccagaaacatcagcacatctggagctgtggccttggggttgcttgaatttgactccttgcccattcttcatgtctgtgttctggaccccttgcaggtcagctttttgttttgttcctgtctactgctggcctcttcagaccttgcacttgtccatatgtctgctcctgtctgttccaagtcaggtttccagcttcactgtcattggattcaattcctatcagctactgggtctgctcctgtcttggccttgctttggtgacccccgttctactcttgggctctagattctcttccttcttttagctcacagcttggtgttgagccatggtttatacccatcatgactttatccagctgttttcaaggggaggctgggcaagaggatgtgtatgccttggtgaaaaagtattacctctttagggaaactggttatactgtccaggatacctgtggaaacacatccgtgacattagttgtggcaatagcatggcggtgaggagcacattctggaattaggtaaccttgattctctgtcctttgcctcccatctgtgtagctttgtaggggttattaatcctctgtttccttgtatgtaaaatttgaacatgacaaatttcacagggttgttgtgagctagaagatgcataggatatccttagcatataataaatgctcagtaaataatagctattgctttcactataaatgtctggggaattgcaagtagcttggagttattattgcatgctttaataacgtggaagttatgctacaagctttggttagtctttctaatttattacaactgatatatattaggtattttctatgagcaaagggttatgtcaagcactttccaggatgtaaagtatagaatatgatttcccttgaaagaggttgcaatttattaggaaacaaacaaaacaattttattaagaggccaaatgtgatagatggtgcaagggagatgccaagtctagtgggagcagaaggaaagaatggggtgtctaatgactcagagaactggaaagcgctccgtcaagtagaggacatctgaactggaccttgaaggatgtgagtatttctgaagacaaagaagggagatgtaggaatttgagtaggcagatattgaggtaagaaggcatatttagggtaaagtaaccttgagcaggcagatattgaggtaagaggaaatatttggggaaagtggtcttacagtgttatttaaattggggatctttgtaaatgtacaattggagaccattgtatgaatgatctcaaatgtcaaatgtcatggccaacaaatttagactttattctatggcaagtggagagtgttgagcagcagagtgttataatcaggtcacatttaaggaaagattggctggaatagatcctgagatgaactggagctgctgtattagacctggaggcagtgggaagcgagaacaaattattgcatttgtctaggtaggaggaatcctagatcgtattaggatataagagagaaaacatgtaagagtcatttcagtggttgaagcaagaggactgattgaatttagaaggcagggaaggtggatacattggagaactcattggagtctgggagtctgggaaaacagtgacatcattaacatagaaatggaaggaaggagaaggataaagaaagatgatcagtcttgtttagtacatatagacgtggtatctaggactagtggcacattctggtggaaatatttagcagccagttggaaagaccttgtaaggtagcactgctcaaatcccgttgggatttagtttgtttttaaatccatgtaggctagaatccttctcatacttcttgtactcagtatttttttttttgcgctattctccttagcagcatctaataccagttttcccctttggaggtttgcccagtggtgcagttagggaaataatgataatgattctgcctcgtgtgtgtgtgtgtgtgtgtgtgtgtgtgtgtgtgtgtgtattatagctcagtctataagggaacgtgcaatctttaacttatctgacctctgttttctaacttgtaaaatacgatgaataataatcaccttatctatctcctggaatagttgtgtgtccaaattagaatgtgactaaaaacacaattaaagtgctatataaataaaatgaatcattcttatactcatcatcaaagtccttagcggatgtctttcgtgtgacttttaaacccattctcccattgcttcctataaagtaggaaatcacccaatgagaactccttttttttttttttttggcattagcctgtgaatcatagacttatttcttctaaagtgacaattaaaagcaaagagaaagaaagcccaactgcataaacacatctatttatattttaaactgaaagtgcattcacccaaaccacaaaaccccaaatcaacttttagctccttccgaggccatgtccagtccctgggctctcccggaggtgaactgctgggaaagtgtgtgggcttcaagcccaggatcgactcaatggcttcttcctctcccctccccacgccttccctccagcacacctgtttgcagaacttcttcctctcttgcccaggcattttgattctggtcacgaccacctgtgaaggatgacgcagatttagccctacgcacatccttgccttgttgctgtcttcagggtcccaaactgggttgattcaccccacaggacattatttttagcctttatctcttagtggttttgttttctttccgccgccttttgacctgagagctggaaataaagtccgccttccataaagacgagaaagttgtcagtcatttccttcctgctcacatgaaaggccggcccaacggagcttgcagaagacgctgcaagttccagttcactgggtcctgaaaacacccgcactttgggagtgaatttcatttcttccgtgtaggctaagaagagaggttgcctgggctaggcagctgttctttcaaagggtcttgaagatgctcaagggaaatgcaataaaagaaaaccacattttccctctccttttgatcatggttgctgaacccaaacacctgggcagcctgcctacttttaaatatttgaaataattaaaagaaattcacaggcaaaacgagaaagtattgctttcagcatgaaatcatatcacactataacatcattggacagaaaacttagtttttactatgaaataaaatatgagaaattgctttgcaaattttgtaaagtgctaggtatattaaagatctcgaaaattatagtttgttttttctgattctgaaatgaatatatatgtatctatatatattcaaatgaaatagaaatatataaaaatagaaaaatatatgagcatgcagtatctttttcaatatcggaattcatttttgggctattataattcaaccacttgcctattgatattatttttggagaggtattatcaatattagtgccactaatttcctcctacatttatgagtgaacttttctatcattatcattcagattaaattctaaatgtgtaattactgactcaaggcatacacaattaaattaaaattaagttatagctgatgaatgaaaattatatatatttatggtatgcgacgttttgatatatgcatacgtcgtgaagtggttaaatgaagctagttaacatctccattaccacaatatacttacttttgttgtgagaacatttaacatctacatccttagcagtttttcaagtacacagtatattattatcaactacagacacccatttctccaggaagacagtaccaatttacagtttctacaaaggtgtatataaatttccattttctcaaactcttgccaacagagggttttgtttgcctgcttctcaatctttgttactttggctgtcctatttgttattgggtaacttgagtatctttgtgtatatttgtgagctatttaaatctgtctctcatgaattgtttaatcctttcccattgttttttcctgtgaggttatcttttactaattgattgataagaatcactttcctattgggtattaattatttttctcttatatatgcaaatatcttcccagtttgtcacttgcatttttgctgccatacaatgtttttttcctttgtttttaagtggctaggcatattcatcttttcctttatggtttctgctttttgtgttggatggcattttctgtcactggatatgaggcttgcttctaggcaggctttggagctggacagactaacttaagcctcacttctgtctcacattggctgagactccaagaggacaaatcagttgcccaggtctgtgtatcgggataataatccatatttcacagtgttgtttaataactagtaggcttaggggtctagagctcaggactaggcttgtcataaaggaggggcagggtgttagtttcctttctccctcttatcttcaaaatgaactggatactgatttagttcctctaaagaagagaacaacagggatgagaaggtctcttttactgtcttgctttcagttaatactaataaatgctctacagggaagtggttctcaggatgtcctatgggtatcaaggcagtgcctatctctttcctgctttagcatattgtttttgtttttttttttttggaaaaagaaagtaggtaatttctgttcctgtattttcatcaagttatacattttttgaaagaataattagcctcatggcaaaatgcaactctcctcaaagatgaaaaaccaaaaagattaaatgtagatgctcgtgtgaaggtttcaggtaaaacagagagaaaagacgaagctgaggcatccaggagattcttgggaaagaagggcttcttccctgtagaagagacctccttgggactttattatttctacatacacctttatgttaacaaaatctagcctcagtcattaaaaaaagatctgtttctgcaacaaccaccatattcattagcacatcaaaaactttagttttatatcgtatagatagaatgaaatatgaaaagatgcctcagtaagagatttacttggtttcaccgtccaacatctacctacatcttttcattctctccaaaaataatgaagccataactttcatcctttgcaaagaaagtaaattttcagggaagctccttttctctgccaagtgtaaattttgaaacactcctcagttaggtctgcatgcacaaagtaatggaggaaatacaaccagccaacaagctaatccaagaaataggagctcactgttactttacttacctgaatatctaaaatcttggttatttcagcctgaattatacagaattattgaatcatttctaagtcattttgtgtgtgtaggcacagtctattttagggctctattctttatatccataatcagatgagctaatgtatgaaatattaagctttataactcttatttcaattttcttaataatctatctcctgcttctcatataataaaatttaaatttcacaaacttatttgaaatcatcactatagtgggattgaggataaattcagcatctgtcattaaaatgtaatccagatatgggatgggaatgctttttttttagatggagtttcgctcttgttgtgcaatggcccgatcttggctcaccgcaacctccacctcccgggttcaagtgattctcttgcctcagcctcccgagcagctgggattacaggcatgtgccaccacgcctggctaattttgtatttttagtagagacggggtttcgtcatgttggccaggctggtcttgaactcctgacctcaggtgatccgcctgcctcggcctcccaaagtgctgggattacaggtgtgagccaccacatctggcaggatgggtatgatttttaaagcccagagtacaaataataataatagggataataagctatataaattatttattaataaaaataataatcaaatagtatttgagtacttaggattgattggttgattgattcattcatcaaatacttagtgagtgcctactatgtgtcagacagggttctatatactgaagatagagtgggaagcagataagatccttgcacatacagagctaattatcctgtagccaatggggaaacataacaaatgggagaatgcagaaatgagatgactgtaggtagtaataagcatataaataatataaataaaataaaattgggagacgtaagagatcatgttgtggtgaggaaggtggtagggaaaatgcaatacataggttgggcagggaaggtctttctgtagaggtgacatttgtgctgggatctgagtgatgaagcatgtgagagtgatgaagcatgtaaggaagagttttccaaacagagggaacagcggctctaaggcccagaggaaataatgagtttggtggttgtatgtatgatggttaattttatgtgtcaacctggctacaccatggtagccaggtgctcagtcaaatactagtctagatgttgctgtgaagatattttttagatgagattctgtgtaaatcaatacactttgaggacacgaacagacagttctcaaaagaagacatacaagcggccaacaaatatatgaaaaaatgctcaacatcactaatcattagaaaaatgcaaatcaaaaccacagtgaaataccatctcacaccagtcagaatcgctattattaaaaacgctaaaaaacaacagatgctggtaggctgtgaagaagagagaatgcttatacactgttggcgggaatgtaaattggctcagccactgcggaaagctgtttgaagatttctcaaagagcttaaaacagaattaccatttgacccagccatcccattcctggctatatatccaaaagaaaataaattgttctaccaaaaagacacatgcactgttatgttaatcacagcactattcacaatagcaaaggcatggactcaacctaggtgcccatccatggtggactggaaaatgagaatgtggtagatataaaaaatggggcatatatatcatgtaatactatgcagccatagaaaagaacaaaatcatgttctttgcagcaacatggatggagctggaggccattatcctaagtaaattaatgcaggaacagaaaaccaaatactgcatgtcctcacttacaagtaagagctaaacactgggtaattatggacataaagatggcaacaatagaccctggaaactactagagtggggaggaaaggaaaggaacaagggtggaaaaactaactgttggttactatgctcactacctgggtgacgagatcattcatatctcaaatctcagcctcatgcagtatacccaggtaacaaacctgcccatgtacctcctgaatctaaaatagaagttattctttaaaaaaaaccctttgagaaatgcagattactcttgaaaatgcaggtgagcctcatccaatcactagaaagccttaagagaaaaaaggctggtgtctcctctggaagaagaaattcttcctgcagactgtctttggacctgagctgaaacatcagcttccctggatctcaaggttgctaccttaccctacaggttttcaccttgccagcctccacaatcacatgagccaatttcttaaagtaaatctctttctctcacacacatgctgtttgctctgtttctctggagaaccctgactaatacactacatgaataataagttgaaaggaggagagactaaagtgacaagagtaaagatgagaagaaatgggtggtgtggtatgtgttgaagttacaggtcacagaaactgaatatatgaagtgagggaaaggatgaagtgaagggcaattcttctggtaggcactgtgctaggggctctctctctataatgccttatttttacgataatcattatcacattttattttattttattttattttctgagacggagtcttgctctgtcacccaagctggagtgaagtggcacgatctcggctcactgcaacctccgcctcccgggttcaagcaattctcctgcctcagcctcctgagtagctgggattacaggcacacgccgccacacctgactaagttttgtactttttagtagagacggggtttcaccacgttggccaggctggtctcaaactcctggcctcgtgatccacccgcctcggcctcccaaagtgctgggattacaggcgtgagccactgtgcctggcctatcactttatatatgaggaaagcaagagccaaaattttgagtcaaataacttttcagaatcatgagcctatagatgtccacatttgtagattttctaaggatcatttgagaccaaatgccaaggaaatacttttcaattggttcctatttcctgacttgaagttgggggcaggggaaaagatggattgttacagtactttaagatcctgttggttacatgtagatcaatttgtcctattaaacacaatacaaccttcctagcatcttgtttttcttacactttctttatatctttgccagccaatgactcttcatttaattatttgtatattacttagttgttacttggtttcaatctattgtttaacacacctgtgagtggttagaaatttttcagtcacaatcatattagtgatatccttgaggtaagaaaagcgagaaagtgcttgatcaactccagtcatatacacatattttgttatttcatccttccatgtatcgtccagaatccatgctaccattcccatgttgcagaagatcaaccaggggcttggagaaataaagtatgatttttctcagattacagaaataacaaatgacaaaaacaaggtacagagaagatatgctaggacactctccatcatttcatgctattagtgtttctgatttttttctatttttttctagtatctctcctctttggttgtttcatacaataatctttaccatctgccacactaaatatatattaaaaatatattccagttaatatacagtttgtgtgtgtatgtgtgtgcatgtgtgcacgtgagcacctgcactgggactcttcaaattttaatgtaagtgggactttttatttttttttgagacagtctcgctctgttgcccgggctggagtgcactggcacaatctcggctcactgcaacctctgcctcccgggttcaagcaattctcatgcctgagcctcccgagtcccttggattacaggcatgtgtgaccacaccgggccctaagttttgtatttttagtagagacggggtttcaccacattggccaggctggtcttgaactcctgaccacatgatctgcctgccttggcctgccaaagtgctgggattacaggcgtgagccactgtgcccggccataagtgggacttttatttatactgatttggcagcttaaaaccaccctttcccatagaaatgaacatatataaaaggagaccatttgactttcaagacaaagcttgctttacttcctttgctttcgtatgatattagttctattaagagttgtcttttcagttaatctaattattcttcagtaatgacatttcctcatttttgcacctttgagttaacaacattcccaggatttttctcttatggtcttcattatatatagtgagcaatgtgtttgttaggaaatcattctgtaattctagtgtttacctgagttcaataacccctcagcataatatagtattaatgaggactttcaaacaagagagctaaaatgttgaaatcttcacgtgcttgtctgcagcttttggatacaggagatcatttaaaatagactttgaattttatttatttttgagttctgataactttctaggtgaccttggtgtgtatgaacagcatgggccaaggaactgttttttttccggctttcagacgtcagattgcttcctttcacaccttggaatgtcagaaatttactgacttctttctccctgagatgtttttctcttgcagtattattacggggacagcagtattctgtttacttgttgccgggtggtttttgagacctctgttgcaattgaaacaagaagccaaccaacaaaatcaactcttgcaatcatttctgtcacaaagaaaatgtcacatgaaccttctcaaagcctggagatttagtgccaaaatgcattgtgacatttatagggtttaccttaggtttagaacagagacctgagtgccctaaaacttagtcgtgtggctaaggatcatttgagactaaatgccaaggaaatacttttcaattggtttctatttcatgacttgaagttgggggtaggggaaaggatggattgttacagtagtttaagatcctattgatcacatgtcagtcagtttgtcctattaaacacagtacatgtgtatgggggagtcttggtatgtatccaattccattctctattaaatgacaatcttgataaaagtttatgggtttttactaaacaaaaaccagaagagatttggtggcagagatatttagtgctcacaaaatatcagggcttccttgccttcctttctcagccttgcttgcgattaagttcgagctgtggacccgttttggcaaacgggttgtgagcagaagtgatgtctgctcctttgatttctgccccccaaatccctccatgactcttgggttctttcctcctgtgctgcagaggccttgggagctgagatggggaaatggtggcaacatgagatggagaagtcctggagagaattttcctgtaaaaaattctgcactggacttagcatgagcaagaattgaacctttgcggtgtagagcacccctccccccatattttgggtttctcttgttaccttaccagagggaaggttaatttttcaaatttgtataatatcaggatgactgtccaaatttttatcatagttctgaaatgggagagttccctgaccccccttgcaggacatgtgacaggggtgtggctcatctgttcggtagctgccactgctcaaaccccttatgggagggggagcacacagacagataggggcaggagcccaagcaggtgtgtgttatagtgagctcttttaaccttgccgtccatgtgaagcttaagtattaaccagttcagtggaccctctgcctttttgcaaggatggagggccagagtgacagctttctgtattctgagctcttgtccagcatcccagaaaaattgggtcacagacggatttgaaggatggtgaatgcaggggttttattgagtggtggaggtctttcttagggggtggatggggagctgggaaggggatggagtgggaagatgatctttccctggggtttggctgtccagtggctgattctccaaccgtccccagccaaactcctcccgacattccttctcttctccccttctctactactcttctgctcttctctttgtctgcttctctcctcctagagctggggatttgtgttttatatgggcaaaggataggggagtgtggcaggacaaaaggcaacttttgggtgcaaaaactggaatgcctgttcccatttagggcctcaggtatctaggcttgagggtagggcctttgctggggacccccaccctcctgcctcttgttcttatcatttctaaggcattgccttagaaactgtctgagaggtaaagattttatttccacagtctcataattcacatcccagttacttatgcatatgtctggacaaactttggttgcagtgtttggcagctctttgtgctctgcaaagtatttctgtggcatttgaaatgctcagacaaccccaacaatgtgggagttgaggaggagaaaatgtagatgcaatttcccttcagagttatgcattttgcacacaatgcatagtgggcggaacatttatgtgaattgtgcctttggggcatcattgaaagttatggcctgtaagaaaatgggaatcagttttatttaagttggtctttaaaaggcagccctagaggaaattttatccccattatctctgtcaactgcaacttttatgtcttgctgctgactgtctattacactcctacctctcaagtcatcttctgtatctacatggcattattccacttgggcttcctcccataattcattttctcaactttaaattgatttgtttttaagagagagggtctccctatgctgcccaggctggtcttgaactcctaggctcctcccacctcagcctcctgagtagctgggactagaggagtcacgtaccaccatgtttggcttttaactctttgtttttgaaattatctcagacttaaagacaatttgcaaaaatagtactgagagtttccatatatccttcaccagtttccccaaatattcaaatttcagcttgtttattacttgtcttctttttctttctctgaaatttttgggagtaagttgcaaatatgatgtcttttatcccaaaatgcttaagtacatgtttcctaaaaataaatgttctttcacataactgcagtacaataagcaaattaggaaattaatattgatctagtattaatttagtccagcagttggcaaatgtgccttcccagttatgtttgtaaataaaggtttattggaacatagccatgcccatttgtttatggaccatccttggctgctttctgcctacaatggtattgttaaatagttgtggtagagactacatggcctgcagtctctgaaaacatttaccatctgatcttctagaggaaacacttgtgaggcttcatctggttgatagatcttatcgaattttatcatttgtccataatgtcttttactgcaaaaaaaaaaaataattctcatttggcatcctgtccgtgatcacatattatatttgattgttatgtctttttattctctttcattgtaaaacaattatttggtgtttctttattgttcatgaccttgatacttttgataaatacaggacatttattttgtataccacatttcagtgtaggtttgtgaacttttctcgtgatttgatttatgttaagcatttttggcaatactcagatgtgatgttttgtctttcttagtgcaatctaatggggcgcacatgatgtctatttttctcattattggtggtaattttgatccctttggttaagatgataaggtttctccactgtaaaattgtttttccctttgtccttaatacgtatcttgtgggaaaatgctttgagtttatgtaagtatcatattttaaatcaaacttccaccagtagttttagcatccactgatagttcatctctataacaattactattatggtggttgcccaaagcgatttttcttttttttgagacaaagtcttgctctgtcacccaggctggagtgcagtggcgtgatcttggctcactgcaacctccgcctcccgggttcaagagattctcctgcctcagcctccccagtagctgggattacaggcacctgctaccacacttggctaattttttatttttagtagagacagggtttcactatattggccaggctggtcttgaactcctgacctcatgatccacccacctcagcctcccaaagtgctgggattacaggcatgagccactgtgcccagctgaataaaggaattttaaaattcgctttggtggctcacacctgtaatcccagcactttgggaggccgaggcaggtggatcacaaggtcaggagtttgagaccagcctggccaatatagtgaaattcctttattgttccatatttactagtgtgaaatctattcttagcaaggatcttccttcctcccttctttcttttttcttttctttctttctttcctttctttctttcttttttctttctttctttctcttttttctttctctttccttctttctttctttctctctctttctttctccctctttctcttttctctctttctttcctttcttctctttctccctccctcacatctttccttccttccttccttccttcctccctccctccatttttttcttctctctctctttatttctttcatcccacggatttttaattttattttgtggtctataatctataactatcgttgtttattttgatgctcaaaatgttctaggacaatttttacttttaacaatgattcattaggtagtaacttgaaatactcagggtcaaacgctgtgtttcaaacatctctgcatagctgttgcctagtatagtgcatggaaatgttaggcattcaataaatatttttttgaatgcaggtcctaactcaaatgactaaaccactaaatatggaatgttaaacactggattagacaatgtattaggcatatgttggagtatagcttcagtattatagccagtgtgagcaaaaaccatgatttttttttcttttttgattaatattttctgagtagtgaggctcacttgatttttaaaaatttaatcaattttttctcacttgcttttgagactgaaatctctttatccgaaacatggctttccctagacatattctagttctcgcttagtgggaagtgttccaaattcccttgtggtctaaaaccttcttagtgttatccaagtggtggaaagtgattgtcttagggattcaggaaagatttttacctgactccagaacaactaattcagaataaaagcagttctatgtattttccaaatctctattttctgaaatctataaaaactgatcacaatagtacttctaagaaatgataatgatattctcttattcaacatcaccttctttggttccattttttcccctaatttgtcaacaaagggaaaattcctgttgatgctttgcgttttgctgttatgactaccatttatgatttgcccttgagatcagtgaactggtttggggtaggatgggctggtttgggaattataggaatgttacttgaggctgtctgtgcctggaaggaagtcatgagtagtgaagaggaaatagctgagattggcttaaaggaagtgtaaccagtgatattttccccattcctaagtcaagtctttgctgttaccatcaataactgctaactcagaggatgcaaccttagtaattcatttccttaagtaagtggattctacaggcatgatgcttacttcttggccgatattgaagtatctaacaggacttcagtggagcttccatattgtcagtttctgtacccctgtgagcctctgctctcctgctaatcttcccagtctgggaagtagacttggacagagatcggtcttccttttggctctgtggcatggcatagctgaatcaggaggtttaaatgcataattaagcatccttgctttctgattagctcatgaattgcctcttaatccttagagtaaaattggtccattttgtctcagttttggaggtgaattatctaagaaggtaacaacattttttctttgaggtaggtgttcattctatttgtgtagctgaaccaaagttgttcttgggagcaacatgaccatcagatatgtgcaaagcaatttagaattaattgtacagggtgtcatgcattcattattttccccagaagggttaggcattgtattttaactggtgtctacagcatctgactgcaggaattcccttgagcatctcatttgcccaccgtcattatcttttttctcccttctgagctctccttcagcaagaactctgtctcttctatgtgccctgtgacacatcttataaattgctgcaccagattctgatgaaccttgatattcatggaaactgcaacccaggtgggagataacctttgacaggctctctcctattctttagtggccagtttcacaaagaggctgcaggaagctgcttccagcagtctgagtcctgaggaggagacgataacagtgggagaagcacctggtaacagcggcacttcatccaggaagaaaacaggatctaaaatataaacaacatccttacaacacaagtaagtgcacagttcactctcgagtgtgttcgactatattcttccaagagtctcatgagaatcttactgaaacaggaagatggtcaaaagatgaatcaaagtgtcaagatttccagtggacaccatcaaaaaggatttttttgttgttgttgttgatcttttatttttaaacacatgagtatgaccaaccatgccatatctacaatgtcgaactttttttttttagctgaataaaaatttaaatacctcagaactgacactattttaagggaaatgatgtaaatgggaacaaaacaaaaagaagaaagagtttcgatgatcctgtctctctaaaagcatctcttccaaagcagatgttatctttgttaaacatcataggattagtaaagatgacatttattaagtgtttgccattccaggcattgtgcaaggtgcttcctgggtagcatctcatttaatactctggaaagttatgcacagagagggtaagtagctctcctagtgtctcacagctagtaagtcctagtgtctctcagccaggactgagacccaggcagtgtggctcagagctggcttgcttgtcctttacactcttgcctatctgtaccatttatacattttaaaaagaattatattgatagaaccatttatacattttaataagaattgtattgatagaggcatgaggcagagaaattctaggcagacaggggtgggtccctggcaaaatcccaccttcaagtcaaaaatcctgaaacccgtggcccaaaaatgagaatttctatccctatttgctcactctctctcaactggttctttctgaataatgtctttctaacaatcaaatattgccttttccaaaactacctatggcctgccaggatccccatcttgtgcctgtaaagaccccagactcagtcagtagaggagagaagtggcttgactggagagaggtgacttgacttcagggggatggctggactttggaggagagacagtttaactttggagaagagccagccagagccagccagacatcagggaagattatcttcccttcctgtcccctctcaatcatccctctctgctgagagccatttctattgctacataaaattctctacctccaccaaccttcaagtgtccgtgcaacctaattcttcttggatgccagacaggagcttgggacccactgaatgcgggtacccaaaaaaggctgtcacactggctctttgttttcactggtggagggcagctgccctacacaacgagtcaaggaatctactgagctgataacacgctgccgtccatggacggcagagctaagagaggattgtaacatgccctctggggcttcacgggtcacaagcacccccaccctggcattgccacggggcctgcatggagcatgctcctgccagcacccaaagcggctgtctggaacactcactcactcatgtactccctcccacaataggttgagtgcagtgagccaaataaacagggcacctctgttgcaagtccaacgggaggggtcgagaaaaacttctgcatcagtattgtgtccatactcttttaaaaagaccctgtggctggtaactaaaaagccatgatcagtatgctaatttcgtttcttcaaattatcaatgtctctttagttgtagaccaaaacaccaataacatttcatgccaaaagccatttccttaatatttctatggccttcagtcaatgccactacatagtttttaaggatcaggcccaagaccttttgctatcaattatcaagaaaaatctgctgggtgtgatggcttatgtctgtaatcccagcacattgggaagccaaggtgggcagattgcttgagtccatgagtttaagaccatcctgagtttgtctctacaaaacaaaaataacataaaaagaaagaaaatgaaaagtaatatctctactttagaacttctttgtagtatccttgtttattgcaaggaaaagaaactgaggcagaagacaaattgagaagggaaatgtcaaaagtaaatgtgtcattcttacctctgaacaggtataactatcatgagattttaagaatggtggacatccaagctggttcctgctattcagagcagaaccctcctatgacttcagctgtttcttcagttggattgccactgacatttctgggacgacctgaaatctctagagattaagtctttcagaactagatgtacctgaccatcttgaaaatgcacctgcccacctggtctaattagaaaagttactatttcaacaaatagcacatttctctaaaaagaaatgggataaagtagctcaagattttaagacaggtgctaaattctatcttgttgtagtcatcttcatgttattaattcatccattcatgtagcaaatgtttactgaatatgtgctgtgtaccaggcatttttccagggttgaatgcagcagtgaaccaatataaaaactgctgtcctccagtatcttatattccagagtgttattaagtggtctacattttatttctactcaataactgtagatcaaaagaacaaatggtggaacatgataataataaaaatataattgctttgttaaattttcacaggtattagcagtgtgccaggcactttacatgtattagctccttaatctttacaagaaatttatgtagattttaatttacaaaaatgactaagtttttgattcaaccaaatacaattattattcccattttaaagatgaagaaaaagagaaatccactccgcaaccaatgaacagatttcctaaatatcatgtagataaatgtgttggaactgggattgaaacgaaggggcccctgactccaagtccacatgatctgtcaccatgctctactgaatcagaagggtagaacttacaattaaatatgtccagatgaatagaatattagtttaaaggaaaattggcaaccgttaatataatcactgtagatgttaatacaatatagccagcacacactggcttaagtttattttcatcatcatctttatatgccaatagcatttagcccttgtaatgattttcaggtgccaagataagctctggagaaagagcttccttttgcagtgaacccagtgaatcatttatccttcccctaagatcaggaactattttaagtacctgacttccagtgagtgttgtggagattgacaggggtgctggttgtattttgcacagttttaactcacccactctgactttccccaaggcacatcaataagacgaatctatctacaaaaggttccttgtgactcttttatgtggagtatgcctgattcttgcaaaaaagctaaagggccttagtttcctgcaggaaatctgtaactaaatccaggacctagagcggaaacattaagtgtatcgtgggagaaaaggaaagcaaagtgctaaagttgttactctgaacagaggatatcggagcatcctgcaaaaaacttcctgtttagccaggagactagaaaacaagatgaaaaacacttaacttcaatgactattgtgtaaatatatttttatactttcattatcttgggcagggcttactcacaagaactcatggtttcccaaggtggagagttagtcactgagtcacacccagcctcccatcttccttgttttgacggccacactaagaccttgtgtcatttgtataggctatccctaggcctgtaccacatcctatgctgaactttcttcccggaatgtgcttccttcaactggtattaaacagcctgtaggacagattcagagaatgcatgggaaataacctgccttcagctatcctgcctcctccaaaatcaggctatgggaaccagtggctcagtaaagagcaagaaacactgttggataaataaaacgaagctgctaattatgctttctattctgaaacactttcagtggtagaataagatgaaattcaagaaggaaaattggagtttgtagggagtgatggaaaatgtaaatgattagaaaaaaagaaaaattggagttttgaattcctttattatgacaattttagacacttggtcaagcacatcccaaatgatgttatattgtgttagatgttagagtatgtgttatgtgcaatgttgtacagggagtgattctgaaaagagacattctcagttgttttaaacttatctcactggattattctgtatggaacaaagtagaaatgttttaaatgggaaagaatggaaagctagtccctttttctttatgttagctattgagattcactagtgcatctatctcatagttgtgtgagggctgtttagccatcttccttccaagatcttcttaatcttccttttctccttcctctccaccctccaaatcaggatgacctcataattattcttttttcttgcaccatcagttgtgaaatttcctcattaaaaacactagcaacaaatagataaagacagagaagcaccttccatataaatcagtaaagatgaaaaagcataattagtggcatgatgtggtttggctctgtgtcctcaccaaaatctcatctcaaattgtaatccccagaatccccgcatgtcaagggagggacctggtgggagatgattggatcatgggggcggttcccccatgctgttcttgggatagcgagtgagttctcacgagacctgatggttttataagtgtctgacagttccttcttcacacacactcctctctcttacctgccgccatgtaagatgtccctgcttccccttccaccataagtttcctgaggcctccccagatgtgtgaatctgtgagtcaatctctttcctttataaattgcccattctcaggtatttctttatagcagtgtgagaatggtctaatacatgatctgtctgaaatcctgttttctcttctgttctttcggacaccatagatttgaatacaagctcgctttggagacagaacctgttgctactacttttgtaagataacatttgtttgctaagactctgattctgttctacatatagttttatattttccttgcagtccttaagaatgctgtgatgagttataataatagcaataaaaataaatctgccaattgttgagttcctttccctggttgttaattttgataacctctttaacgcaatgacctcctctataccactttcaatgactgtaccttgggccatgttgacaattcgagttgttccacttcagaaacccagagttccctctctctaactctgatcacttagcttctggttaactcctaacaggagctcctattatacctgttctttggtcctctcatgacctctggtcctttgaacatttctatcagttccctctggtctttacttctcttcttgcttagcttagcttcacacatttcatttcttgactcactttttttgccagtatcctagatacctttgctctggttgtcattgttttgttgtttgacctcatgtccacaagactgagttgttagtatacgtatggttaatccaagcaagcttccttcttcctttaatcacatttttattattcaattattttccccatcctcctccatccctgatccattaactcttcttgacatatggcatctgtggattacattaggggatattgcctcaatccaatttccacagttgtattttgacttgaatatatctaaccacctattagattagggccattccttttgctgttttctctacctagaacattctgccttcagattcctagagagttttctcctttagttaagtgtcatctcattagcaaagcttctctgaacactgtatttaaaattgtagcacatcttatgataacttttgaggacaagcatctctccatgtaaatagcctgaaaatgtaagaggaatggaatagttaattaaaacatgacatgctcatagataaaatataggtaaccataaagatatgtaaataaagtatataattctaaatatgcttgggatactaatgcatgcatacatatatagctacttccatatatatatatattttttttgagacggagtcttgcactgtcgctcaggctggagtgcagtggcacgatctcggctcactgcaagctctgcctcccgggttcacgccattctcctgcctctgcctctggagtagctgggattacaggcgcccgccaccacgccaggccaattttttttttctatttttagtagagacggggtttcaccgtgttagccaggatggtctcgatctcctgaccttgtgatccgcccgcctcagcctcccaaagtgctgggattacaggtgtgagccaccgtgcctggcttccatgtttttatacacagatacgtaccaagaaacagacatacctgcattcaggactctggctacatagttgtagggctctttgcaaaataaaaatttgaaatctctttttcaaaaattattaagaatttcaagacggtgataggagaggattaaaccaagaatgggattcttctgagtgtgtggccctatctgactacacagtgtatgctcataaaatcagctatggatgaatatgttgatgacaaaattactacaaaaagatacgttcagatatttcttgtagctaccctttttgatagcattatggatgtttattatttttttcctactactttttgatactacctacaattttctcaatggccatgggttgctttaatagtcagaaacaagtctgggcatggtggctcactcctgtaatcacagcactttgggaggtcgaggcaggcagatcacttgaagttaggagttcaagaccagcctggtcaacatagcaaaaacctgtctgtattaaaaatacaaaacattagctgggtgtggtggcatgggcctgtagtcctggctactcatgaggctgaggcaggaggatcgcttgagcctaggaggtcaaggctgcagtgagccaagatcatgtcactgcactccaaagtaagactatttcacacaaacaaacaaacaaaaagacagaaacaaaattatttctaaaggaaagtacgatttttaaaaaatcgtgcaaagctatgatatattccctgaaattcaactgtgaggtttcctagacatgcatatactttgctggtgaatactcaaaatacttcattttgcagatttgggtatttcttttctttttctttttcttttttttttttgagacggagtctcgcactgttgcccaggctagagtgcaatggcacgatctcagctcagtgcaaactccgcctcctggattcaagtgattctcctgtctcagcctcctgagtagctgggattacaggcgcacactgctgtacccggctaagtttttgtgttttagtagagaccaggtttcaccatgttggctaggctggtctctaactcctgacctcgtgattcacccgcctcagcctcccaaagtgctaggattacaggcgcaagccaccgcgcccggccagatttgggtatttcttctacagttgcctagtagcaacaaaattggtcaaaattgattgaagtagataaaggctgtctttattgtccttctgcctttcattttttctccccatgaaggtctctctcagcatttccttttagcagtctactaacttcctgttttctaacacacccctttttataagagaaaaaatagttatcatttgttagaaggttactgtgtgtaaagaaccacactaagtaaattataatatctcctttagtctttttaacagtcttttcaactagatagtattatcctagttttataggagagcatgtaaaggcatagagattatgtatctgtggctaaggtcatagtaagagacagagctgggattagaattcaggtgaggtaggtcagtctctaaatatggccaccaacaattcctcccatctctgtacatgcctgcagtgtctcagattaagaagaggaaattatgtccccaccccttcatatagaataccttcataacttgctttgcataatagaataaaatagaaatgactttctaggactttggcatttaggccttaggataactggcagcttctgcttcttaggccttgaaacctagccactatgcggtaaggaaattcaggctagactactgaatgattggagaccatatatagaggggttgagaataagtaggtcatagtgttgcacgtgtaaacctcacagtctagtgggggagacagttccataaaccaaaaaccacaaagcattgtaatgtgtgttgtactagaggtgagtaaaaaatgttgtagaagccagaataaagtggtagcctcgtgtgtgagtgtgtgtgtgtgtgtgtgtgtgtgtgtgtagaacgtagctttgtggaagtggtgacagcacttgtcccccatctcgaagggtatgcagagatttcctaggtagaaaaaggcatcccgggctaagagaacagtatttgcaaagttatggaaatgtaacagaacaagacatgtttaggaaatggtgagtcaatagtactttctatagtttcgttgattcttatacttctaaattttaactgctttaaaagatgtaaactttctcattgcagcttcccatgctggtagatgtggaggatggatgtgaggaaaggcttcctccactgattggtggagaagattttttttttttttttgagacagagtcttgctctgtctcccaggctggagtgcagtgatgcgatctcggctcactgcaacctctgcctcccaggttcaagcaattctcctgcctcagcctcccaagtagctgagactataggtgcacactaccacacccggctaatttttgtatttttaatagagacagggtttcaccatgttggccaggctgctcctgaactcctgacctcgtgatccacctgcctcggcctcccaaaatgctgggattacaggcgtgagccaccgcacctggccaggatttgtttttaaacattcattcctcttaattgatttttttgttgtgatatttgaatgtactgtgttagtttcccagggcaactgtaacaaatgaccacaaatgtggtggcttaaaaggacacaaggtggggaacatcacacactggggcctgtcatggggtggggggaggggggagggatagcattaggagatatacctaatgtaaatgacgagttaatgggtgcagcacaccaagatgacacatgtatacatatgtaacaaacctgcacgttttgcacatgtaccctaggacttaaagtataatgaaaaaaaaaaaaaaaagaaagaaatctattctctcacagttctggaggccagaagtctgaaatcaaggtgttggcagggccacgcttcctctaaaggtgctggaggaaggtccttccctgcatcttccagcttctggtggctccaggtgatttttggcttgtggcagtaccatttctgtctttctcttggtcttcaatggcctcgttctctgtgtctgtgttttctcctcttcttataaggacattgtctttgcacttaggaccactctaatctacgatgatctcatcttgagattcttaattacatctgcaaagaccctttccccaaatagggtcccctctataggttctgggtagacatatattttgttgtgggccaccaattaacccagtacatatagtaacaaacatttacctttgctaatggtttatatttaacaataatttttttaaaaaaattctctgttttatcatttataaatttcaaaaagtttaaaactctaacgtgtttaattccaaatgtgactttggctgggtctctctcctaagcagcactttagtagatttttctcaggcagaatgcaaaaggtctacatcagagtagaactggccctgtgattagctatgctaaattgaaaccttatgaaatatagtgtggttacattaaatggcagttagaatgtggtctacattattacaaataaatgtttttcattatattttactgtcagcaaatgctggtataaaactcattgcctttcctcatatggctaccttgaagggagtcagaaaatacattggcatctgagatcttcatgtgaattattttgagaattccaaagactccaaactcaattcaaagaaacatgatggaaatttcatgggcttttaattggactttcatctttgcttcctttgtcagtaaagaatgactgtcctggaacttgaggttgttgctagacccccttcttaaaaaacaaacaaaaaaaacctaaaggttctatagttaaagcctcttgggaggggaagaagactcactcagtacacagaatgataaaattttacttgccgaggtaacatacatgactttggacaggtttaagctcctttttcattggaaggaagagaacttttaggcttgcaggtgctatttctttcttcttccaatttctacaactggaaactagtcattgtagggttttccttaaataagtccaagtctacaggaggcagcagggagtctattccactgaagccttcctatgaggattgaacagcttctaatttcttgatcattctaatcatcataaccatctggaagatttcgtcattaaactaatagttggtaatcatattgtcctggctttcaaaataaaacaaaacgataagggcttctagacaatccaagcaggctatttgtcgaactgctctatttatctgtgtcgatttcatttatatatttcaaacacccactgcctctaaagtataccgaatcatgccctcaagcaattggtctcatctacaaagaatgagcctgacccatgattctgtgctcctctgtttctcacattatagtcataagttagcccaaagagagaagcatatgattctttggatgagatctctgttatcttttaaggagataagaatcataaactccattcaaaggtgacatcagaacaatgaaggacattctgagacagagcgaatgacctcatgacattttccctagattttctaacttttcttctgtttagtaatcaatcattcactgactctaaatgtatgggaggtaaaagtttttctttactttcttatattctgagggtgggcctgcaagttaaactgacaaagatagatgaatggaagaaaattgtacacattgtatgtgatgttaatattcttatgtgggcagggttttcatagaaaagaggtgaaaaccccccaaaaagcaggtaaactggagggcatctataacattttagcaaaggatgataacctggggagaagcgactatgacagaggaaagagggtttgggcttccaggggtggtgaatggtgggaaggtaaatttatgaggaaaagcaataataaacaagagttatttactaaagtttgcttacacagcacatcttggtgctatctccatctcctgataagggttgttctcctctttctaataggggagggtgggggacacctttgtttagcctaaagctaaggtttcgccatatacagtgaactgtaactcaaggggctgtggaaatatagactgtaacctattcttgaaacaagtagccaagttttagccaatcacagcagctgagtttcagccaatcacaggcagccaactgtctaaactgcgtttaaataaggcagatgctgagctgtaaccaatccagctgtttctgtacctcacttctattttttgaacctcactttccatttcctgtcgattaatgttatctgaccatgtggcagcccaagagtcgctgggaacctattttgcttctgggagctgcttgattcatgagcttaattaaattgttaaatctaatttgtctaaagtttttcttttaacaccttcacgaggggaagtttatgccctgctttaagcagagggggacggcagagctcttctgtgtctgctttttctcaattgcccccagctcaaaataattcttatgccggcatattttggggtgacatattctgatctccttcattgggaagcagtccctgagtgtgagcctagcaaagactctcttcttagaaatcctccctaatttgaaacatagtggttaaaattcagaagctgggtctctgtgcacgttatctaactgcttggcacacaaaggtttgtcaaataaaagacaggcaggtgatgaatgcattgagaattgttgtcaatcctacctaaagttccacagacttagagaacatgtctttctacctgacaaccattcagagcagtttggctgttccaactcgcgtcctcaatttcatcattcaaaatctgtgagaccgatactgagctctcatggaagactggctcatttaattgaacaatttggaaaactgttgagttgaggaaatgtatacagaagctaggtggcgctggcggccacaggctgcacaagataatcctctgcatgtcagaacatgccctgtgcccaaaggacacagctgtgaaacctttctgaagagtttagtatcagatacagggagaatgatttgaaacaaaagagaaatacagaaattccacagcatcactttcagactgtccaacattacccattccttctgacataaacatgaaaacccataaagcacaatttgtatttatctattttctaaataaactcctcctggtcatttgctttttgaatattctgtttggtctctttggttttgcaatcaccactgacttggagctccacagaaaaaccagaagttccaaaatagcaatcggaagagaacttggtttcagtcccttttccattaatgcctattttccacaaccacataacctgtgcatttggaatattttcccaatagcactggctttcataagctgtagtgactgtcaggaaataaaactgctttggtggaaagaccagaattatatagctgagaacacaggaatgttaaaccagccttcgaagtcttgcagaataggagagaacaaaagtgggctgtgtcagtgaggcaggtttaatagaaatagaacatttatgaatttctagtcacatcttctgaccagataatcttctacagagtcatttagcttatgtatgggagatacgaatcttacaagtggaagatgaccatgcctaagtcagaatataatagtctgacaaaattttctgctttatgtatgcttatggaacttgttttatatatagacatatcacatttatatagtcatttaataaatttcattcattgaaaataatacaaatgcattacaatgaaaacaatcattaggtacgtacttttggttaatatttccaactgtcctgaaagatgtggtataaatatatctgtaatccctaggggtttattgcacaagaaaaaaagcagagcacactgttgattttttttttttttgagacatattggctggtaaaatgttgatactaattaattctgaagtggaaacaggcttacaggctggcagacgggttataaaatttttttttttccattggtctcagaattgctagaatctttgtttcagcaccagtagctctggtttaggttaatatttctgcctccactcaataccatgttatacaccctcttgcctactgtcaaaggagtttgttgaagatagtttctttacctgagaaagaataccattctcctttactcctcttttaccatgtctcctcttctacctgaccagtgtacatatttgtcaactctttttccaacctgttagcatgttactgatggagggcttcacggaagaagcatggagttgagaatttcaacttttacttctgttacaggagtggccttcagcctcacttagatagaaagggccacaataaactcagaggagtaataggctcagaaatggtggacaacatactcatcttatttatcactgggtttctggcccttgatgcagtacttggtatttagtcagtgctccttgctaagctgcttgtttgtgtctgcttccacattccaaagatatgaggatatgagtttgaatagagtatgagatagttaacaaatatgaaaccagtggtattgagcaccaacaacatacagagctgtattagaaactgagaattgcaaaaaatgatatatttgtccatgtttcccaagaggttacctattaatacataactacatatttgtaagaagacattatagcatattgcctgtgaaccatctgcctcagcttctagttgtttcctctgattcagctagccaaatgccacaagaaaccacaaagccaatttgtgttcttggataactgcgtgcaacacccattagctttctatgggcaggatttggcgcagagaactcatctgttgccagtgctcaaaagaaagtcaggattaaataaacctatttctgtattcttacaggcgtgcctatgaatccatgaggctacagtcacgatggcatacttggcaagctcagggcactgttatcttttgaattaattttgtgacctgttataaatgcaagttcccttactgtgtttcaaaggctttttgctccctattccaatgtcacaagttttcttctatgacaaagatcgtgttagcttaatttttttgctacattgtgattttttttgatattgcattatagctccttccccttttggcatacatgcattcatagctaaattatggagtgactggggtttccttcccttggcatgatttacctctggtcagattattccttgttgtgggggactgtcttgtgcattgtagggtatttagtagcatccctggcccttgccactagatgccgctagaatttcctgcccctaaaatgtctccagaatttgctaaatgttgggatagggaaggattgccacctgtcgaggaccactgatttatattaatgtaacttttctgcataaaaccattaaataccattactcaagggatataagctggctaatgattttctctgcggcatttagcaaaaaatccatctggtgaaaataccagtgaagaggaacagaaacaattgtaaatcttcaaaaatcattccttgagcaagaaaatgccttgggctagccactgccttccccattcaccctgacccccaccccaaatacaacattttatttttaaccatctaagtaaggctgatgttgctgatggataacagctgctgtattagtctgttctcacactgctatgaagaaatacccaagactgggtaatttataaagaaaagaggtttaattgactcagttctgcatggctgcggaggcctcaggaatcttacaatcatggtggaaggcatctcttcacagggtggcagcagagagaatgaatgcaagcaggggaaatgccagatgcttataaaaccatcggatctcttgagactcactcattatcacgagaacagcatgggagaaactgccaccatgatccgattccctccacctggtcccacccttgacacatgaggattattacaattcaaagtgagatttgggcggggacacagagccaaaccatatcagctgcagagatctctgggtggagtgttatgtgagtgagcttgctacagattggagtgagccactgaactgttaggggcatttttctgattagaattgcattctgctatctttgagtttctgctgaggttgcttgtcattacattggcaggcagatagaaactatgagatatgctattgtaaatgcattattttctctattatttatagctgtgagtaggtagtgatataggtggtaagaaagcaacatcacagatttgatatggtttggatttgtgtccctgcccaaatctcctgttaaattgtaatccccaatattggaagtggggcctggtgggaggtgactggatcatggaggtggaattctcatgaatgctttagtatcatcccctcttggtactgtgtcgtaagttctcacaagatctggttgtttaaaagtatgtggcacctcccccgtccctctctctcttgctcctgctctggacatatgaagtgctggcttcccctttgccttccaccatgattgtaagtttcctgaggcctccctagaaaccaagcagatgctgtcattcttcctgtacagcctgcagaattgtgagccaatgaaacctcttttctttataaattactcagtctcaggcctttctttctttcttatttctttttttttgtttgtttttgagacagagtctggctctgtcacccaggctggagtacagtggtgtgatcttggctctttgcaaccttcacctcccaggctcaagccaacctcccacctcagcctctagagtagctggaatcacaggtgtgtaccaccacgcgtgactaatttctgtattttttgtagagacagggtttcaccctggtctcaaacttctgagctcaggcgatctacctgcttcagcctcccaaaccgctgggattacaggtgtgagccaccatgcccagcctaggtatttcttgataggagcgtgagaacagactaatacaagattgaaaggaggaaggccaaggcaggtgctagtagttagatatatataagtgcagtcgagaatcaggaataaagccttgccaactgccctctcagtagtttaaaaccttcagaaatctaaatttagcagttttataggtgattactaagaatttgtctctgccagccaaagtcaagaaagcaaagaagagaatcgtggttgccaggggctgaggggaggggaaaatggggagttgctaatcaaagggcaaaaaatcagttatgcaggatgcataagccccagagatctgctatgcaacattctgtatgtgcacagcaattactatattgaacacttaagaatctggtgggagggtagatgtggtaagtgttaagtgttccttactacattaaaatttaaaaaagaaaaaaaaacagtatgtatgaccttgtgggggaaaaataaaaaacctttaggtaaaagaggtcagtttttttttcctttttttttataatcatttttttaattttattattattatactttaagttttagggtacatgtacacaatgtgcaggttagttacatatgtatacatgtgccatgctggtgcgctgcacccattaactcatcatttagcattaggtatatctcctaatgctatccctcccccctccccccaccccacaacagtccccagagtgtgatgttccccttcctgtgtccatgtgttctcattgttcaattcccacctaggagtgagaacatgcagtgtttggttttttgtccttgcgatagtttactgagaatgatgatttccaatttcatccatgtccctacaaaggacatgaactcatcattttttatggctgcatagtattccatggtgtatatgtgccacattttcttaatccagtctatcattgttggacatttgggttggttccaagtgtttgctattgtgaatagtgccacaataaacatatgtgtgcatgtgtctttatagcagcatgatttatagtcctttgggtatatacccagtaatgggatggctgggtcaaatggtatttctagttctagatccctgaggaatcgccacactgacttccacaatggttgaactagtttacagtcccaccaacagtgtaaaagtgttcctgtttctccacatcctctccagcacctgttgtttcctgactttttaatgattgccattctaactggtgtgagatggtatctcattgtggttttgatttgcatttctctgatggccagtgatgatgggcattttttcatgtgtcttttggctgcataaatgtcttcttttgagaagtgactgttcatgtcctttgcccactttttgatggggttgtttgtttttttcttgtaaatttgtttgagttcattgtagattctggatattagccctttgtcagatgagtaggttgtgaaaattttctcccattctgtaggttgcctgttcactctgatggtagtttcttttgctgtgcagaagctctttagtttaattagatcccatttgtcaattttgtcttttgttgccattgcttttggtgttttagacatgaagtctttgccaatgcctatgtcctgaatggtaatgcctaggttttcttctagggtttttatggttttaggtctaacgtttaagtctttaatccatcttgaattaatttttgtataaggtgtaaggaagggatccagtttcagctttctacatatggctagccagttttcccagcaccatttattaaatagggaatcctttccccattgcttgtttttctcaggtttgtcaaagatcagatagttgtagatatgcggcgttatttctgagggctctgttctgttccattgatctatatctctgttttggtaccagtaccatgctgttttggttactgtagccttgtagtatagtttgaagtcaggtagcatgatgcctccagctttgttcttttggcttaggattgacttggcgatgcgagctcttttttggttccatatgaactttaaagtagttttttccaattctgtgaagaaagtcattggtagcttgatggggatggcattgaatctataaattaccttgggcagtatggccattttcatgatattgattcttcctacccatgagcatggaatgttcttccatttgtttgtatcctcttttatttcattgagcagtggtttgtagttctccttgaagaggtccttcatgtcccttgtaaattggattcctaggtattctctttgaagcaattgtgaatgggagttcactgatgatttggctctctgtttgtctgttattggtgtataagaatgcttgtgatttttgtacaatgattttgtatcctgagactttgctgaagttgcttatcagcttaaggagattttgggctgacacagttgggttttctagatatacaatcacgtcatctgcaaacagggacaatttgacttcctcttttcctaattgaataccctttatttccttctcctgcctaattgccctggccagaacttccaacaccatgttgaataggagtggtgagagagggcatccctgtcttgtgccagttttcaaagggaatgcttccagtttttgcccattcagtatgatattggctgtgggtttgtcatagacagctcttattattttgagatatgtcccatcaatacctaatttattgagagttttttagcatgaagggttgttgaattttgtcaaaggccttttctgcatctattgagataatcatgtggtttttgtctttggttctgtttatatgctggattacatttattgatttgagtatgttgaaccagccttgcatcccagggatgaagcccacttgatcatggtggataagctttttgatgtgctgctggatttggttcgccagtattttattgaggatttttgcatcaatgttcatcaaggatattggtctaaaattctcttttttggttgtgtctctgcccagctttggtatcaggatgatgcatgctggcctcataaaatgagttagggaggatttcctctttttctattgattggaatagtttcagaaggaatggtaccagttcctccttgtacctctggtagaatttggctgtgaatccatctggtcctggactctttttggttggtaagctattgattattgccaaaatttcagatcctgttattggtctattcagagattcaacttcttcctggtttagtcttgggagagtgtatgtgtcgaggaatttatccatttcttctagattttctagtttatttgcgtagagttgtttgtagtattctctgatggcagtttgtatttctgtgggatcagtggtgatatcccctttatcattttttattgcatctatttgattcttctctcttttttctttattaatcttgctagcagtctatcaattttgttgatcctttcaaaaaaccagctcctgcattcattaatgttttgaagggttttttgtgtgtctgtttccttcagttctgctctgattttagttatttcttgccttctgctagcttttgaatgtgtttgctcttgcttttctagttcttttaattgtgatgttagggtgtcagttttggatctttcctgctttctcttgtgggcatttagtgctatgaatttccctctacacactgctttgaatgcgtcccagagattctggtacgttgtgtctttgttctcattggtttcaaagaacatctttatttctgccttcatttcgttatgtacccagtagtcattcaggagcaggttgttcagtttccatgtagttgagcggttttgagtgagtttcttaatcctgagttctagtttgattgcactgtggtctgagagacagtttgttataatttctgttcttttacatttgctgaggagagctttacttccaagtatgtggtcaattttggaataggtgtggtgtggtgctgaaaaaaatgtatattctgttgatttgggctggagagttctgtagatgtctattaggtccgcttggtgcagagctgagttcaattcctgggtatccttgttaactttctgtctcgttgatctgtctaatgttgacagtggggtgttaaagtctcccactattaatgtgtgggagtctaagtctctttgtaggtcactcaggacttgctttatgaatctgggtgctcctgtattgggtgcatatatatttaggatagttagctcttcttgttgaattgatccctttaccattatgtaatggccttctttgtctcttttgatctttgttggtttaaagtctgttttatcagagactaggattgcaacccctgcctttttttgttttccatttgcttggtagatcttcctccatccttttattttgagcctatgtgggtctctgcatgtgagatgggtttcctgaatacagcacactgatgggtcttgactctttatccaatttgccagtctgtgtcttttaattggagcatttagtccatttacatttaaagttaatattgttatgtgtgaatttgatcctgtcattatgatgttagctggttattttgctcgttagttgatgcagtttcttcctagtctcgatggtctttacattttggcatgattttgcagcggctggtaccggttgttcctttccatgtttagtgcttccttcaggagctcttttagggcaggccttgtggtgacaaaatctctcagcatttgcttgtctgtaaagtattttatttctccttcacttatgaagcttagtttggctggatatgaaattctgggttgaaaattcttttctttaagaatgttgaatattggccctcactctcttctggcttgtagagtttctgccgagagatccgctgttagtctgatgggcttccctttgtgggtaacccgacctttctctctggctgcccttaacattttttccttcatttcaactttggtgaatctgacaattatgtgtcttggagttgctcttctcgaggagtatctttgtggcgttctctgtatttcctgaatctgattgttggcctgccttgctagattggggaagttctcctggataatatcctgcagagtgttttccaacttggttccattctccctgtcactttcacgtacaccaatcagatgtagatttggtcttttcacatagtcccatatttcttgaaggctttgttcgtttctttttattcttttttctctaaacttcccttctcgcttcattttattcatttcaacttccatcactgataccctttcttccagttgatcacatcagctcctgaggcttctgcattcttcacttagttctcgagccttggctttcagctccatcagctcctttaagcacttctctgtattgattattctagttatacattcgtctaaatttttttttcagtttttaacttctttgcctttggtttgaatttcctcctgtagctcagagtagtttgagcatctgaagccttcttctctcagctcgtcaaagtcattctccatccagctttgctgcgttgctggtgaggaactgcgttcctttggaggaggagaggcactctgctttttagagtttccagtttttctgctctgttttttccccatctttgtggttttatctacttttggtctttgatgatggtgatgtacggatgggtttttggtgtggatgtcctttctgtttgttagttttccttctaacagacaggaccctcagctgcaggtctgttggagtttgctagaggtccactccagaccctgtttgcctgggtatcagcagcggtggctgcagaacagcagattttcgtgaaccgcgaatgctgctgtctgatcgttcctctggacgttttgtctcagaagagtacccggccgtgtgaggtgtcagtctgcccctactggggggtgcctgccagttaggctgctcgggggtcaggggtcagggacccacttgaggaggcagtctgcccgttctcagatctccagctatgtgctgggagaaccactgctctcttcaaagctgtcagacagggacatttaagtctgcagaggttactgctgtctttttgtttgtctgtgccctgcccccagaggtggagcctacagaggcaggcaggcctccttgagctgtggcgagctccacccagttcgagcttctcggctgctttgtttacctaagcaagcctgggcaatggcgcacccgtcccccagcctcgctgctgccttgcagtttgatctcagactgctgtgctagcaatcagcgagactccgagggcgtagaaccctccaagccaggtgcgggatataatctcctggtccgtggttttttaagcccgtcagaaaagcacagtattaggataggagtgacccaattttccaggtgccatctgtcacccctttctttgactaggaaagggaactccctgaacccttgcacttcctgagtgagtcaatgcttcaccctgctttggctcatgcatggtgcactgcaaccactgtcctgcgcccactgtctggcactccctagtgagatgaacctggtacctcagatggaaatgcagaaatcacccatcttctgcgtcgctcacactgggagctgtagactggagctgttcctatttagccttcttggctgccccctcttttctttaaattcaatattttctgaccattgtgaatggaagtggctttcaaagatggggctatgtatctattctagtccatttcctcacaatctatcattataaggctaaataccatggggcacagagatgcttaagaaagaaaactgaaggagagagggtggggtttggaacagaattagcatttgttgaccaggtatcagttgatattatctcatatattgtttgcaagaagcctgtgtctatttcctatttatagatgattaaacagaggtgagagaagttaataaacatgtccaggttgacaaaactaggaagtggcagagttgacattcatatctttttttgtaggactccaaaccccacccccccttttttttccccattaaaccatgaggcctctggacaagatgaagtatctgacctttcagcttctggtactgaagagagcattgcaggtaggcatcctctttgatgagatatgagatgtcaaaccaacatattatgattacacactatataacttccaagacatttgtatatattgattatgatctggctacaggacataatatttgactgccaaagattaaagtatatttcgtcttcttttttttttgagatggagtttcactcttgttgcttaggctggagtgcaacggtgccatctgggctcactgcaacctctgcttcctgggttcaagtgattctcctgtctcagcctcctgagtacctgggattacaggcaactgccactatgcctgggtaatttctggtatttttagtagagatggggtttcaccatgtttgccaggctggtcttgaactcctgacctcaggtgatccacccgccttggcttcccaaagtgctgggattacaggtgtgagccactgatcccagcctagttaaagtatatttctattgcttattacttaaacatataatgcttagaaaaggaaaggctgattaaagcacacagttacaggaaaattttccagatatgttattttctatttaaagcaaccatttaacattttatttgcggttccagaattttgtttcacaaatatttctgagcctcacagaggctttagatgtgttatgaaaactttactgaagtgaacacagtggtgtattactaaaggatgggtgaaatagaaacctttttttttagctacatttcttattgatagattgaactcaccttctttgaagccccattcccgaaactatagatcagaccctcagtgttgttatggaacgtgctaacgtagtcctctacacagtcccatccttcccatgcatgctactaagctaagacctgtgactgcctcacctcccttcaaccctagtctgcgaagaaactgcctttgaacttcttagtgatggcagtctgtcccctcgtcaccagtgcattcctgacgatcttggtgaaagctatctgtgttctctgggcttcccatggaacatgcttatctgttggaccttctagactcatgtcatttatccattttagcaagtatattcccttagctcctttatttcttcctctatcacctgctagggaaatgcaggcatttctacattgctgaaagctgaccattgtttttttccaggtttctaagagccacagtagcaatgagtttgtctcattccctccataccttgctagaacattaaactgtgttaaataaaatacttctaattcaatgaaatcttgcttatccagctttacgtttttgtctccttgatcaagcatcctcaaattcaaatcacaggagaacttccctgactcctgccagttcttagggatgtagtcttttaggcatataattgctttctgctcctatcagactcagcatatccctagcctggttatgatgaaatttttccctatttagcagtccggaaggcagaagagaagatgtggcagctcctgagtggggcactgtattagtttcccgtggttgctgtaataaattaccacaggccactttggcaggtggatcacgaggtcaagagattgagaccatcctggccaacatgttgaaaccctgtctctactaaaaatacaaaaattagctgggcgtggtggtgcatgcctttagtcccagctacacaggaggctgaggcaggagaattgcttgaatctgggaggcggaggttgcagtgagccgagatcacgccactgcactccagcttgtcaacagtgtgagactctgtctcaaaaaaaaaaaaaattaaaaaaaataaataaattaccacaggcttcgtgacatacaataatacaaatattttgtcttttagttctgaaagtcagaagttctaaaatcaagatgctagccagagagaagttgtttctttgaattttctaactcctggaagccacttgccttttttgagttatggcttcttcctccaccttcaagtcctgcaacatagcatctccattctctctctctctctctgacttctgctttcattgttgtgccttcctctctgacactgaccctactgccttcctcttacaagaactttttttatatttaaatactttttgatgcattatatttgtacatatttatggggtacatgtgaaattttgttatatgcatagaatgggtaatgatcaattcagggtattcagggtattcatcacctaaggatttagcattttcatgtgttgggtacatttcaagtcctcttctggctattttgaaaagtataatacagtgttgttaattatagccacgctgcttttctatcaaagattgaatgtatttcttctatctaactgtgtttgtacccattaaccaactctcttcattccctcttctacacatacaccctttccggtctctgttatctattattccactcactacctctatatgatcattttttttttttttagctctcacataggaattagaatatggaatacttgtcttctgtgcctggcttatttcacttagcatattaacctcaagttccacccgtcttgctgaaaatgatattatttcatccttttttattgctaaataatatttcattgtgtatatataccacagattttttgtttttttgtttttacccattcatccattgatggacagttacgttgattccatatctttgctattgtgaatagtgctgtaacaaatatggcagtgtggtaatcactttgatatattgatttctttgcctttggataaatacctaacagtgagacttctgggttatatagcaattctattttaatttttttgagaatcttcatactgttttccatagtggctgtattaacttacatttccactaacagtgtataagagctcccttttcccttttctctgtaatctcatcagtatctgttatgttttgtcttttggtaacagccattctaactggggtaagttatctcactgtggttttggtttgcatttctctgataattaatgatgttgaacattttttcatatacatgttggctatttgtatgtcttcgtttgagaaaggtctattcatgtcctttgctcatttttaaatgggatttttttaaaactgttgagttgtttgagttccttgtatactctggatattaattccctgtcgaatgagtagtttacaaatattttctcccatccaagaggttgcctcttcactctgttgactattttctttgctgtatagaagctgtttagtttaatgtagttccatttgcctatttttgttttagttgcctatgcttttgtggtctcagccattaatcctctgcctagatcaatatccttttaatagttttataatttcaggtcttatgtttaagtctttagtccatcttgagttgatttttgtatatggtgagagataggggtccagtttcattcttctgtatatgattatccagttttcctagaatcacttattgaagagggtgtccttttccagtgtctgttcttgatggctttatcaaaagatcagttgactataaatgtgtggatttatttctgggttctgttgcactggtttaagtatctatttttataacaataccatgcttttttggttactatagttttgtaatatattttgaagtcacgcagtgtaaggcctccagctttgttctttttatgcaggattgctgtggctgttctggctcttttttgattgcatatgaattttaggattttctttctatttctgttaataatgacactagtattttgataggaatttcattcaatgtgtagattgttttggaaagtatggtcatcttaacaatatcaattatgccaacccatgagcatggaatgtcttttcatttgtttgcatcgtcttcaattgttttcatcagtgtttagaatgctttgagcccacccaaataatccaggataatcttcataccgcagtattctaattaattacttgtgcaaggtcctttctgccatgtaacgtaacatattcagagattatagaaattaggacctgacatctttttgtgtgtgtggcagggtggtggagggcgtggggctattatttcatttaccactggcatgtgttgttttatgggagaggggcatctgcagtgggaaatgctagtccttattagaggaatggtgggctacctcatgccagcgactatccatgcccctccttccaactggggtgctgtcttcttcctctgctgggtggtggttagccagttctaatcctcaactcattgcctgtttctgaggatcactcctggcaccacttttgttattccaggtcttctgggaagtagatgccaagactggattaaacatgtggggaaacagctggaaacatctgggaaaatgccatatgaaggaaaatggggaggggactgagatagacttggagagccttcacagtgtgaagcaagtgtgaccctgagaagcaagtgtgaccctgaatggatatccccctccttctgagggaagttcagtagtgcccctggggggtcctaaatcaaagctggccatcagaggagagcctttgtgtcctaagaatgggttagccttgatacaatcagtcattggccaggagcagcctatgggaggtatacccttggcacaaacctgatgctggattccagagcttgttctattatcctcctgtcttggaagatctgtgaggaacattctcatgctgccacagacatcattttggctttcaaacattagggtatgtactttcagtcgggtgcagtggctcacatctgtaattccaacacttggggaagctgaggcaggtggatcacttggggtcaggagttcgagatcagcctggccaacatggtaaaaccccatctctactaaaaatacaaaaaattagccgggtgtggtggcaggtgcctatagccccagctatttgggaggctgaggcaggagaatggtgtgaacctgggaggtggagcttgcagtgagccgagatcatgccactgcacttcagcctgggtgacaaagtgagactccgtctcaaaaaaagaaaaaaacttaataaataaaaatgcaaaaattagttgggtgcattagtgtgtgcctgtaatcccagctactcaggaggctgaggtatgagaatctcatgagcctgggaggtgtcacccttgccaagatggatccactgcactccagtttgggaaacagagcgagattctgtctcaaaaacaacaacaacaacaacaaacattaggagatatactttaaacaataaacatgtaactataaaattaccacacgagcctcaagaatgtagtttaaatactgtaaaaaaaagtgttgtaaacatccttgaaagttaaaagaaagagcacaagcatttaaaacaagaaaaacatcatgggtgtctgtgatggaccttgaaggatgattgagattctgatggattaatattggttgaggggagaaggcatccttcatggagcaaatgattgaacgtaattttagaaggaggatggtatgcattgtctctgggaaccaggaatggtacaatgacctgaagcatcaggtgtctgtagggaaacaatgattgatttggtgattagctggggtcatatagtggagggcaaggactgacagaatgattaggaattagtcaagaaatagggaaggaaaaaatgttctagaagacacagcaagtgcaagaagaggtagatttgaataaagatgatgaggtctaagggagaagagtgaagatagccatattaatcaatactaaaggtaggattattattagatctttgggatctaataataattaatgaattaattagatctttgggatctaataataagatttgtttgggaattgtgagaatcattatgttaaaataattttaacatggtagctgattgtattagggagtaatggccagatgagagtggaaataaagactccaagccaaaagttggagagtgagagatgaaaaatgttgtggaattctgtagattataataaagatgaaaaaaagaggcagacataagtaagtggcatgaattactaaagagttgttgggataatgaagtaccctgtttttgttttcccagaatatgagcgtccatcatggaccaaccaataacttcaataaaagtgctgtatcccctggcagatgatgagtatcttcaagatggtgagtatcttcatctctgtatcaccaggacctgcctaaaaaaacaggtccataatacagtctgtaagaaactattacataaatgaatgagaaatggatatcaggaaagaaaaaaaccaattatcaatcgggtatgtgctgagagatgagcaatgtcaggcacttttgcctacaccattttactaattttccaacaattcagtgagttagatcttatccccatttaagaaatgaagatattgaggttttgagggctttaataatgactcgagttcccatgattagtaaatggcaaaaacacagagcaggatgctgggttgggcagcggatgacagcaggaatgttctccgttgaagaaggctttgatatggttttgaagaaacctggttttggttaacactaggaaattgaaggagtttgtgagaagaaaggtgcaatttagtggtgagacaatgaacatccagatgatgcagtgaaaatgagacttttcattgacactgagtaggagcgagtagggttagaatggtccagtaattgaacattgatgagaggttggaaagatacagtttcaagaaaggatttgaaaacccaggatttaggaagcgtttatttgatatcacttgcagtttgctgaggaactggggcacagaatagaaaacagtggatcaagtaatatcatgtattgttatctattgctatgtaataaatcatccctgaagttagtggattacaagaatatgtattttcacacagtttgtgtagatcaggaatctgggaatggcttgactggatcctccagcccagggattcatacaaggctgcaatcaaggtatcagccaaggctgcggtcatctcaaggcgtaactggggcaagatctgctttcaagcttactcacaatgctgtttgcagaattcagttcctgctgggctattggactaagagctacagtttcttagtacttagcctctccagagggcagctcacaatagagtagctgactttatcaaagtgagaaagtgagaaagagcaagagagtgccagcaggatagaagtcacagccttttataacctactttcagaagtaatagcccatcacttttgttacttagaaggaagtcattaggtctaggccacccatggtgaggggttacacaagaacatacctaccagaaggcaaggatcactgggggctattttagaagtagtctactccaaagtggttcaccagaaacgagttgctctttctcaacaaagaattagaggtaaagttgttgagagagagtttaacatgacataaaagaagaattggttatgaatcatggcattcggatctataaggaagtagaatgatttatcatcctcagattgacctttttgattcactttcttcaatgggctttctggaaagaagttacctggcaccttacctgactctctctcaattgaagtgttggttaaggtagaatggcctcaccaatctttcagtgtctcatccttatttgaacattcgatcgtacagtagatttgcagtcttatagtgtgtcaatgacagcaccactttttccaaatcttatccagtgattcagtaataaaggcatttcttgtgattctggagcctcagctaagctttgaaacacacgttctgtggcagggcaagttttttcatggtcttcagtggccaaagaacaacagtgattgtgataagttcctagatggaatgataatctgttgcaggtattcaataaagaagaatccaaacatattagtttttaagtttttgtttaaatttaattaatgaattaataaattaattagttttccagatggcatctcactctattgcccagtctggagtgcagtggtgcagttatagctcactgtagcctcaaactcctgggctcaagcatttctcccacctcagcctcccaagaagctgggagtacagggttcaccaccctgcctggctaattttttaaaatttctttttagagatggggtctcactttgttggccatgctggtattgaactcctggcttcaagcagttctccctcctcagactcccaaagtactaggatcacagatgtgagccaccacacccagcacctagcctcttagtggggagagggaacacctttttttttcaatcctctggaaaccagaaacttgttactgtggattttaaaggaatttcaaaggtcttctacatttttgtgggagacaaactcaaccaaaacgctttctcctcatgagggtactaagacaactcaagggtaaaataatagtttttttttgtcctggcgcagtggctcacgcctgtaatcccagcactttgggaggccgaggtgggcggatcacgaggtcaggaagtcgagaccatcctggctaacacggtgaaaccctctctctactaaaaaaaaaagtacaaaaaattagccgggcgcggtggtgggcgcctgtagtcccaactactcgggaggctgaggcaggggaatggcgttaacccgggaggcggagcttgcaatgagccgagattgtgccactgcactccagcctgggcgacagagcgagactccatctcagaaagaaacaaacaaacaaacaaaaataatagtttttttttaatagtgctggacaagtgttacctacatgtaaaagaatatagttagatccctatcttatatacaaaaattaaccaaaaatagataaaaatctaaatgtaagagctaaaactatacaactcttagtagaaaacagaagagtacatctttgtgatagtggattaggctgtagtttattagacataaccaaaaacaacaaaaggaagaatagataaatttgacttcatcaaaattaaaaacttctgtgttacaaaggataccatcagtgaaaaggcaaccccacagatggggagaagagatttgcaagtcatgtatatgataagggatttgtatccaaagcatataaagaacgcttacaactcaggaaaaaaataaaaatgaaaaggcacagaacccaatttgaattcaggcaaaggattagaacagacatttctctaaagatgacatacaaatggtcaatacacacatacaaggattctcaacatctgttagtcatcagagaaatgaaaatgagaaccacaatgagttaacacttcacacctgctaggatgggaataataaaaatgacagataataagaagcgtcagtgagttaatggagaaattggaggctcagactttgatggtgggaatgtaaaatggcacagctgctttgacaaacagtttgggattttgtcaaaaagttaaacatgggctgggcgccatggctcacacctgtgatcccagcactttaggagggaaaggcaggcagatcacttgaggttagcagcctgaccagcatggtaaaaccccatctctactaaaaatacaaaaaattagctgggcatggttgtgcatgcctgtaatcccagctactcgggaggctgaggcatgagaattgtttgactccaggaggcagaggttgaagtgagccatgatcgcgccactgcactccagcctgggtgatggagtaagactccgtctcaaaaaaaaaaaaaaaaattaaattaaattaaattaaaaaaaaggttaaaaacagatttgctgtatgatcctgtagttccactcctaagtatatacctaagagaactgaaaatacatgtccacacaaaatcttgtacataaatattcatagcagcattgctaatgtaaaaacaatccaaatatctatcaactgatgagtggataaataaaatatttgttcttttttttttttttttttttaagacggagtctctctctgtccccaggctggagtgcagtggtgtgatcttggctcacggcaacctctgcctccctggttcaagcgattctcctgcctcagcctcctgagtagctggaactacaggtgcacgccaccatgcccagctaatttttgtatttttagtagagacagggtttcaccatgttggccaggatggtctcaatctcttgaccccgtgatctgcctgcctcagcctcccaaagtgctgggattacaggtgtgagccaccgtgcccggcaaacaaaatatttataatacatataaacattggaatattatttggccataataaagaatcaggcactgacacatcctccaacatgcatgggccttagagacgtgatgctaagggagaggaaccagatgtaaatcaccacacattgtataactgcatctatgtaaaatattcggaatagacaaattcacacatataaagtaagccggcagtggctggggctgaagggaagggggaaaggagaatgaatgttaatgactatggggtttctttctagggtgatgaaaacattctgcaaatagatagtggtgatcaatgcacaactttgtgaatatactaaaaaaaatcactgaattgtacacattaaaagggtaaattttatggcatgtaaattatattttcatgagagtattattttaaaataaccgtcctttcatctcagcccttctgagttttgaaatataattagacaaatgatagcgtggattatggtgctggagcctctgagccaatggtaaccagtttaaacttttagtcgtttacactccattatgcgtttcttgtttttcatttttgtttttgtttttacttgagacagagtcttgctctgtcactcaggctggagtgcaatggcataatcacagctcacagcagcctcaacctcttgggctgaagccatcctcctgtctcagcctccgaagtagctgagaccacaggcatatgacaccatacctcgctaatttttacattttttgtagagatgaggtcttaccatgtcgcccaggctggtgtcaaactcctgagctaaagcaatccttttgcctcgacctcccagaatgctggtgttacaagcgttagccaccatgcccagacccattacgtgttttttatttattatatcctgttgaatgtatctaactccatcacaaaacccatcccatcaacctaactgggtatcattcaatgaattgtacacttccattcagtatgaatataaaggccagaaaaatccattttttgttatttcagtcctttcagttttcattaatattttgtttctaaagacgaataatctaatgaatgtaattagatgagatgctaacacatgtcacataaaatctaagacagagttcaagttctaacttcccatcccctgaattctcaattctgtttttaacactggaaataattgtttcttggcactggatcagatgtatttaatatattttaaagcacaagatgtacaatgacaaaaattaaaaatgcccccaaagaggaaattacagcacatgatagcttattattattatttttttaatttggcagttttctgctaagttcaaagcagctggggagagtagcaagtaacaaagtgagacagatttatgaagcccacacttggcaatatttttgtgtaaaattagtcaaaatcattatacttgtagatgaagaaatgaattccaacaagtttgcatttttttaaagaaaaatcgtattttgtctaagtgaactggaagaactgagcaatttattggattagttgatcaccagcattgtaactcacaataaaatttgaggatgtctgccaagcattggctctcagaggagcaggataataatacactgattttcaataagtagaattcagcccatattacagcctatcttcctatccaaagaactgaggggaaataagccattagaagaattttccactgaaacttctttgttttgctctaatgtattactaaaattttctgataacaaagaatgagacagatataaatatgcaccattttaataaaaacccaactacaatacatcaatttaaaaatataattgaaatggctgatttcagagctggggcaggatgggcacaagatgagcctgaaatatattgttatgccataaaataaaaaagcactacatccatctacctatcatgacctgtcaccaggaaaaaaattcaactcgaaggggctaccactgggaaaatctaggttgatttgagcatcaaataatggagtacaataataaagtataaatcactgggaaaaaagaaactcatgggtttataccaaaaataaatagataaataagtgggagaggagggctcttgctaatagcagaatattgagggccagttggtaagtgtcaggggagcactggagttgaaaacttatcattttccaaccatcgtggtatggattggatccgataagaataatcaatggattcttaatattagaggaaattttgttgggaaacagaacatttgtatggtttcaaagtgtctctctacagactgcttatctattgtaaggaagtatgatggttaatagagtgtcaatttgattggattgaaggatgcaaagtattgatcctaggtgtgtctgtgagggtgttgccaaaggagattaacatttgagtcagttggctgggaaaggcagatccacccttaatctgggtgggcaccatctaatcagctgccagtgcagctagaatataaagcagacagaaaaacgtggaaagactagactggcctagcttcccagactgcatctttctcccatgctggacccttcctgccctcaaacatcagactccaagttcttcagttttgggactcggactggctctctttgctcctcagcttgcagatggcctacggtgagaccttgtgatcatgtgagttaatacttaataaactcagatatacatatatatgtatcctattagttctgtccctctagagaaccctgactaatacaggaagacaaaaaaatacagtaattatgcagtggagaatcagatcacaccttaactgcaccttgaccagtggtcccagtgaccatcacccatgaacaggtggccttgtgtccctccaggtgtgacactcctggaaggacaccacattacctatgcagtattccatctgagaacacataacttcaataaaatccaaaggagaaacattctatgaaacaaaaataggaatgtatttttccaaagcatcaatgtcatgaaagactgtggaaatgtttcagattataagaggtcaaaaataaaagataagtgttgataaggttataaagaaaagggaaccctggtatactgttagtggaaatgtaaattaatacaaccattatagaaaacaattgggggtttctcaaaaaattaaaatagaaataccacatcatcagatgagtagattgcaaaaattttctcccattctgtaggttgcctgttcactctgatagtagtttcttttgctgcgcagacgctctttagtttaattagatcccatttgtcaattttgccttttgttgctattgcttttggtgttttagatgtgaagtccttgcccatgcctatgtcctgaatggtattgcctaggttttcttctagggtgcttatggttttaagtctaacatgtaagtgtaagtctttaatccatcttgaattaatttttgtataagatgtaaggaagggatccagttttagctttctacatatggctagccagttttcccagcatcatttattaaatagggaatcctttccccattgcttgtttttgtcaggtttgtcaaagatcggatggttgtagatgtgtggtattatttctgagggctttgttctgttccattgatctatatctgtgttttggtaccagtaccatgctgttttgtttagtatagccttgtagtatagtttgaagtcaggtagcatgatgcctcctgctttgttcttttggcttaggattgtcttggcaatgtgggcccttttttggttccatatgaactttaaagtagttttttctaattctgtgaagaaagtcattggtagcttgatggggatggcattgaatctataagttaccttgggcagtatggccattttcacaatattgattcttcctatccatgagcatggaatgttcttccatttgtttgtgtcctcttttatttcgttgagcagtggtttgtagttctccttgaagaggtccttcacatcccttgtaagttggattcctaggtattttattctctttgaagcaattgtgaatgggagttcactgatgatttggctctctgtttgtctgttattggtgtataggaatgcttgtgatttttgcacattgattttttatcctgagactttgctgaagttgcttatcagcttaagaagattttgcgctacaatctactcatctgacaaagggctaatatccagaatctacaaagaactcaaacaaatttacaagaaaaaaagaaacaaccccatcaaaaagtgggcaaaagatatgaacagacacttctcaaaagaagacatttatgcagccaacagacacatgaaaaaatgctcatcatcactggccatcagagaaatgcaaatcaaaaccacaatgagataccatctcacaccagttagaatggcgatcattaaaaagtcaggaaacaacaggtgctggagaggatgtggagaaataggaacacttttacactgttggtgggactgtaaactagttcaaccaatgtgcaagtcagtgtggcgattcctcacggatctagaactagaaataccatttgacccagccaacccattactgggtatatacccaaaggattataaatcatgctgctataaggacacatgcacacgtatgtttattgtggcactattcacaatagcaaagacttggaaccaacccaaatgtccatcagtgatagactggattaagaaaatgtggcacatatacaccatggaatactatgcagccataaaaaatgatgtgttcatgtcctttgtagggacatggatgaagctggaaaccatcactctcagcaaactatcgcaaggacaaaaaaaccaaacaccgcatgttcttactcataggtgggacttgaacaatgagaacacatggacacaggaaggggaacatcacacaccggggcctgttgtggggtggggggaggggggagggatagcgttaggagatatgcctaatgtaaatgacgagttaatgggtgcagcacaccaacatggcccatgtatacatatgtaacaaacctgcacgttgtgcgcatgcaccctataacttaaagtataattaaaaaaaaaaaagaaataccacatcattcaacaaccccacttctgggtatataaacaaagggagtgaaatcagtatgttgaagagctgtctgcactgccatgttcattgcaacactattcataatagccaagatatggaatcaacctaagtgttcgtccatggatgaatgaagaaatgtggcatctatacacaatggattactattcagctttaaaaaagagggaaagtctgtcatttgcaacaacatggatgaacctggaggttgctatgttaagtaaaataaaccaggcacagaaagacagatatcataggatctcactcatctgtggaatgcagaaatgtaagcttcataaaatcagagagcagaatgctgattaccaggggttgggggagaatggaattggggaaaaggatataatatttcagttaaacaggagaaatcagttcaagagatctattttacaacatggtgatgatatttaataaaaaattaaaagaggccaaagagacatgacaagtaaatacaatacctgatcttagactaaattttgtactggagtggtgggtggggcaatgtgatatatggccctgttagatcaaatgagaaaattggaatacaaagtatagagaaaaacatttgccgatattaaattcaccaacgttgacaacttttcttggttatataacagaatattcctattgttaagaaatacgcactgatatattaataggtcgaaggccatgatctatttactttaccatcaagtggttcagaaaagaaattagatgtagctagatagctatatacattgacaaatagtcttaatgatagaacaaatggggtaaaatgttaaaaataggtgaatgtgaataaatggtaagtggggattttcatattatttttatttccacaatttatctgtaaatttcaagttatttcaaaataaaaagttaaaaatatatcactgatttgggtaatttgtgtttctgttggcaaaaggttgcttgcttctaaagaactcagcaaatgaatccctggacttgggaaatccaccagtacttttcaaattatgatgactttgcaaattaaaatttggaagcaagtttgggattatgttgagaaggaaaggcaaaaggctaattttatttccatttaagagttacttggttgaaagaaaaacaaactcacgttggccaaaaggaaatttattgtaagtaaagaagggaaatttcatgaaagccagctgtgggaagtactactggcatcatgggaactacaaagatatcagatgcttctctatctctgtctctttctttccttccctctcctatttagccagttctggtcagaactacaggacaaccaggtcgaaaaatctggcaacttcttcagcaaaagtgacaaaaacatttccaaataagagcacatgagctgtgcagacacctcatgtattttattttatgctgaaattagagaacaactgacctaatatttgactaataacttcatgaattttaatctataattaataatttatcttaaggccaatataagattaaaaatattaatgtgagcaatgatattcttagattctccttttataaatatcacatgggcacagaatggagaatggattttagagaaacgagagtgtagtgggatatcatttagatgatgctgtcatggtccaagcaaaacatggtggcttggatgggtataagaatagctgtggagatggacagaaaagggtagataaggaatatctttaagaagtacaactgaaaagtctttgtgttgggttgaatgtgaatgtttgaggaagaggttttcaaggatgtctcccaggtttccagtaggagtgaatggtagagacattatggagattgaaaacattaggggaggagtaattctggggagaaaaagtcatgaattcaatataggccttcttttagtttgagaaactagtaagatacaaatggagttctcaggttgctagatatatgggttcagggcttggagccccaaagaaagagctagtatagagaaagaatcttgagaaaggttgataagtgtgtggcatttgaagccatggcaatttatgcaacaacttcataagaagggaaagagccaaaccttgaagaactccaacatataaggaatagatgggaaagaaagctctccaacaagagactgaaaaaaaaaaaaaaaaaaaggtcttacatgtaggtgggaaattagtagagtctaattttgtcaaatccactggagaaggcgaaaaataagctagtagtcaactgtgtctcatagtagtggaaccagtaaaatggggcaggtattgtgctcaccctctttttgcaaatgaaacaacggttgaggctcagagagcttaaatgacccactcaagatcatggagctactaggtaatgaggctgagatttggactcatgtgtctctgactttaaagcctatgcttttaagcattgcctcattcatttcatcaacaaagattgatttcatacttactacgcataaggaagcctgaagataatgtaactaatagggcctatatgatttagagcctgtactcactgaatgcaatttgttgccaattgaaagttgtgattcctgggaatgggtaaaaaaggctatgtgagttttctattgctgcacaccgaattgctgcaaactcaccacatgaaacaacttccaattatcatctcccagttatataaatgaaaagggtgggtgagaggttctgactgggttctatgcttagagtttcacaagactgaattcaaggctggcctggactcttccctggagacctggggaagaatctatttccaggtccattcagggtgttggcagaatccagtcccttgctgctgtaggacagagaaccccatttccttacttgctttcagctgcgagcctttctcagcttttagaggccccttgcaagctctttgccatggactttctcccagaccctctcatcagttaagcttaacttttcaaggctggtagcaggatctctcaaatagaatcctcctgaaatttatagtcgtttgacttctcttttgctattagccatcgaaatctccatacttttaaagggctagtgtgattaattcaggctcaactgcataatctctctctcttgccttataaccgctcatcatattcacatgttccacccacattcaaatggctggggattggattatacaagggttagggtcactgagggtcaatcttagaattctaccaccgaggcataaagcccttgttgcttccttcttcccaagctctctgttctcccatttaaaaatttcatagttggagagagaagaatgcatataggtgattagtccattgatttgacagtaatacaatcagcactctaaaaaaaaattgcctagtatcttttctctgggaaccagctttcaaagtggaaaaagctaagatgattctacagcagtgggaatgtgcttcatttccccaagataccacagctgggaagctcagctgcctttctgggaagagagactgctctgttctgcatggaaggccagccacgagggagcacatccatgtgagaatctgaggaaacagtgcaacgccatcaacatggcatcaaattctaccacagctgctttgttgcctctcccagaaagatcaagacagaccactgtccagagagagagagaggtgattaaggggataataatgctctgggtatgagcaacaccagggacttactgcccaaactctcagtgagttttcagcttacagctttttgagttgtaccaagatgtcctttctttggaaaaagcagagagagagagagagagagagacagagacagagacatgaacaatgcatttaagaaggctgccagcctctgagaatctggggcctggactcttggctttcagctgaaaagccttcaaaaggccagggaagcgttagtgaaaatgaatggaaagcctctgacaagcatgctatgtgctgcggaaattgcaaacagacttggcatgcttgctcaggagcccaacagaatctgaacatcacttggtattataagtcatgggacagcaggcacttgtttcactggaatgggctttcacattaaaaaaaaagaaaaaagatcaccatctgtctttttttttggggggggggtgtaatttagtgccccagggagggactttgtcattgtgtctgtgtcctgcacctcttttgtagtacagaagagtcatgcagcagaatcagtagctgtcttgaagtactgaacaatggagagaagcagaagtctttacatgaagggtgtttggataagagggcttcaatatagacagtcaggcctgggttcaaacctttattctgtcatctacaatctgggtgatcttaaacatgttgctttgtctttgtgattcccaattagcttccctgtgttccagtttctcatcagtaaaatgggtggcgggggatgaaataatgtctatgagctatgaaaataaactgacatagagaaagcattcaataaatagtagaatctcaaatgtagatagtatcccatcctacattcaaagaacctgttggctgcctacgcaacacctgttcctcctactttcttcatggctggcaaaacttgtcttccagtaaatataatgaaaaggcaaaaccacttgtttttctagcttctcctcttacagtcaggacatgggcctgttacctgattctggcttggatccgctacagccaccttgaaattttaagggatgacacagtggtctgcagaacaaggaaaaatggaaaaagggaaagcttaatgttccatgacattgcagaactgctgaattaatcctggaacttccttcctgtattagtcaggattgtctgagatactccaaagaaataagcaagccctgtatctatagtggtttataagagcaattttaatttcttgcatacactatatgtacagtgtggactgaataggggatttgttccacttttcctcactctggaggccaggtagatagaaaaactgcatcttaagcattgtagagtatcgtttcagaggaacaaagccatctctagagggtctataagaatcctctaaattgtcttcctgtctccagtttattccttgtttaatctgctggtggactgacttctccaaaattccactttccactcttattagacagttgctgctgtagcaatgctgtgtgtgtaacaaccacccccaaacttcagtggcttacaataatgaatgtatttcttactcactcataggtctgtgagtcagtagcggtcttggagggcttacctaggattgcttacctgtgcttgacttcacatatgtattgaattcaagtctgctccctgtagttccttatttgtggatcagctgttacctagtatatgttcttctcatggctaaataaagacatgcaaacaaaccaatccatgcactcatgtgaacatccctgctggtattcatggagttaacatttcactggtcaattcccgtgaccaatcccaaagtaaaaatggcaggcataattatgcttttttctctactgggaggcactgataagtcatgtggaaagtgatgtggatataaaattttaatacaaagaggaagtaagaattaacacaaaattgcaatctaccatacatgtgccagtcaactgatcacaatcttcaatggatctatctctctggcaaaacaaaggtgaaggtcctaaattgggcattcgagaccttctgtgttctggctttttccttctctctatcattttctcccatgcctccttattcaaaccaaactggtttattttattaattcctaatcatccatgtgtggccattttttaattgtttttacatttttccatggaaaaaagtcatattcttcttccatacctcaacctaaagcccaagatacccttctatgccttcagtctccttgtgtttctgcaccatagcatccgtttggactgtttgtttggtgcttagcatttgtgatcttggataaatggttctttaacccatgtagaaacaaaacctttgaagcatacagaatatcctgaacacttggaattgaaattcttggctttactaaaggggaatattcacaagcatgcgggccagtaatcattttcacttccttgagatataaactttcagtggtaacaggaccttctttttcattagccatggatatttggaatccttgggtaactgaaataaaacaaaatgcaatcctgttcttataatctttggagatctagttgattgtgcaacatttgattgaataggagcctctcttccacggaaatagatgaacaatgctaataaaaagaaaaaaccttttcccattacagtattttatttacatttcagtcacctcccaatacccagaaaaagagggttgttgaaaaatgttaggccacctctgctacctttatccttaacatggaaatcgttgccataggaggggactttccatatttcactgtgaacattctttgtctagaaacatttatctccacaatttggctttaggaaagctcctttatgtatgtctagcatcaattggttagtgttcaaatacttaaaattacatagactgggcatagctatcattggcaagggaaatggcattcgagaaagagaatttaatgtatcccagggtagctgtcttgataatgaagagaatgttaagtcttgcagtattgcttaaccctgaaggagtttgtgttagtcagggctcttaggagaaacagagacaatgggatgtgcatgtatgtgtgtgtgtgtctgtgtgtctgtgtgtgtataaccacacataataggatctatatctatacctgtatctatctatatctatagagagaggtttatattaagaaatgggctcacacagttttggaggctggcaagtccaaaatctgcagggcagtctggcaggctggaaattctgacagggactgatgttgtagtcttgagtccaaaggcaatctggaggcagaattctttcctttttgagggaccttagtcctttcccttaaggccttcaactggttggatgaggctcactcacattatggagggtcatgtgctttgttcaaggtctaattacatctgatttaatattaatgacatctaaaaaaatactgtcacagaaacatctagacttatatttcaacgaacaatgggataccatggactactcaggttgacacataaaatcaatcatcacacagctttaatcctagattcctgatattgagtcagtaagttcagaattaaacacctggacaactttcaaggcaggagaatataagtttgctaggactctgacaaccctgctctagcgtatactctctgtattccaattccaaatgcccggttttgagaatagctattctgagagctatatataatttactttatcttttattacttcctaaaaaactgtgttttaagaatatcttcactggcttcgtttgccacctccttttttcccctgctttgtctattctgataataatcttaagtcattcccaataatcatgtttttctaatttgattctaacttttctatagatgggaactatagcctttacctttttatacagcctgtgaaatgaagaggtgcttgttaataagttatgtctattaacaatgtctttgcacaattaatattctgaaaggttgacaatttgtttaaggggaactggggaaacacttgcaaggtaagatttgggaataggaaatttctaaaattaatacaaattaggtgactttaggtgaagttcaagtctgtttattaaattataattaaaggaaggaaatattttatttcaaataaatgataaataataactttgctctaatagcatacattttaaagtaggatgatactccaaagagcatatagccactgtgcaagggtgaaatgaatagaaacttaacatatattttaaaattctttatttctcaagttattaatatatttgcatattctctcttttccaagaccttgtaatacctaaacactgtgcattaatttggtcagaaaatcagtgtgcacaatattttatatttcttttccttaaaccaacttacttatgaccctaacctcatcttgccctttgctaaagaaaaataatataggtggggggctaggggagggattgcattaggagaaatacctaatgtaggggatgggttgatgcgtgcagcaaaccactgtggcacctgcatacctatgtaacaagactgcacgttctgctcatgtactccagaacttaaagtataataaaaaaaattaaaaaaaaagacatccaactaggaaaagaaagcaaatgatctctctttactgatgatatgatcttatacacagaaaactctgaagactccacctaaaggctcctagaacatctccagtaaagttttatgatactttaaatcaatgtacaaaaaaatcagtggtattctttgtagtattcttcttctttttcttattttttttttaatggagtctcgctgtcacccaggctggagtgcagtggcgtgatctcagctcactgcaacctctgccccccgggttcaggggattcttctgcctcagcctcctgggtagctgagattacaggtgactgccaccacacccaactaatttttgtattttttgtagagacggggttttaccataaaaaaagaaaaataggccgggcgcggtggctcacgcctgtaatcccagcactttgggaggccaaggcgggcagatcacgaggtcaggagattgagaccatcctggctaacacggtgaaaccccgtctctactaaaaatacaaaaaattagctgggtgtggtggcgggcgcctctagtcccagctactcgggaggctgaggcaggagaatggcatgaacccaagaggtggagcttgcagtgagctgagatcgtgccactgcactccagcctgggtcacacagcgagactccgtctcaaaaaaaaaaaaagaaaagaaaagaaaagaaaaataatatctcattaattattgaaatccttccctgtctttcctattctcttcttccctcttcttatccacattcattagcattgcgtaaagatgccaaggtcagcacagcatccagtggacgtggagaaaggaaatagatagttccttctcctaatcagtcaatactggttacccccaagataccttttatcccagcctctatgttccttcagagcttgtcctctgctatttctgtgccacattgggacacaggcatcttttccaaggcttgtagactctccaccttgggcctaacattcctaagacactctaagttacaccctctgaggtctcgctgtctaacaagcagtgcccaagcccaaccactcagtggactgtcaagtggactgagaagtgatctcatctccatttgggtgaatttgccttctctcttcttatcactagccttctgtctctgtgcccatcaggttgagagcctctaacaaagtctcatcatatattccaggctttacaaacataagaatctgtcaggaattatctgctggtaagagagattgaaatgggccaagctgccctgctggaataaggaagaagaaactttggggagaattaatttgaaatgagtttatcttgtggcacatggtacatgctctggtacattcaagtcgtttctgctttattcattttccctgctagactgaaaactatgacaggtctgtatagttagttccttctaactctgtacacatgatcatacgtatggcaagctctcaggagatattgttgaatgacttaatgcaggaaaggaacaaagcatgggaagtaatctagaaatagaaccatcattggccaacaaaatcccttggggagcttttacagatttcacttctgggcctcatgcctgaggagtctgatttaataggaattgaggtggggcccaggaatctgtatttgcacaacagcctagcagagctgttcaaaggaaagaatacagtcataggttcttagtttctgtttttgattgggccagtaaagccccttcctcatccctcttttccatttatcaccagagacaggaactaaaaaccatgacttcaagctgctaaaagcctaaaacaaaacaaaacagaacaacaataacaataacaacaaaataaggcaagttggacaagcttgcagggatttccagttaaatcactaatataaaataataatttcattttacagaagagaaaaatgaggtccaaaaaggttaagtaacttagcagacatgtgacaaaaatgagaaacggatccaggtttgatttacattcatttttaataaatatattatttttgttacaaagataatacatctttatgctaaaaaattgaaatagtacatagacttgcagggtgaaaagtaactttccctcttcatctctcagcttcccattttcacccaaagagctaatcacaaattgtgttttttatcttttcagacattttatatacaaaggtaaaaaatgcacatgcagatgtaaatcatgttttacataaatgagattatagtgtgcctagtccttttgtttttcttttttttttttttttttgttgagacggagtctctctctgttgccaggctggagtgcagtggcacaatctcggctcgctgtaacctctgcctcccgggttcaagcggttctcctgcctcagcctccagagtagctgggattacaggcgcgtgccaccatgcccagttaatttttgtatttttagtagagatggggtttcaccatgttgaccaggatggttctccatctcttggccttgtgatccgcccctccttggcctcccaaagtgctgggattacaggcgtgagctgctgcgcccagaccatagtcttatatataattataataatttgtttttttccactcaaaatctttttaaatcaacacttatagatctacttcatttccaaaataaatttctcttttttaaggtgtgaaagcattagataaagcggatatctattctctgacatttttcaaatataggctggctatcaaatataggtttacttatatttgttaccaatgaaaatatctatacctcatgttcgtccaggtttccttgccaaatttttaaagactttcaattttgaacaaattttgtagagtctctttcagtttgggtttgtctgatgttttctcctgtttggagtgaagttattcatttttggcaaaatattacacaaacgatactgcgttctaagcatgaattaataagaggttcatgatgttgacttgtcttgttgctggtgatgttgaccttgatcacttggttaaggtaatatctgctgggtataccgattgtaaagttaccatcttacctttttggtcttaataaatacctttgaaggaggtacagtgagactatgtaaatcctgtttctcctaaaatttttgctcaccaaatttagcattcattggtcttggcacatttttagctggagtcaccttcaagatgaaatatattcaaataactcatttgccagattgtatttagtatattttacaatttttagtgccacgatatgctagattttgtggaatttttttttctttgaacagagaaattttatagaaacaagtattaaaaaatattaggctgggtgcagtggctcacgcctgtaatcccagaacttttggaggctgaggcgggtggatcccgaggtcaggagatcgagaccatcctggccaacatggtgaaaccctgtctttactaaaaatacaaaaattagctgggcatggtggcgcatgcctgtaatcccagctactcaggaggctaaggcaggagaatcatttgaaccggggagtcagaggttgcaatgagccgagatcgtgccactgcactccagcctggcaacagagtgagactctgtctcaaaaaaaaaaaaaaaaaaaacaaaaaaaaccatatatatatatatgtgtatatatatatgtatatatatgtgtatatatatatgtatatatatgtgtatatatgtatatatatgtgtatatatgtatatatatgtgtatatatatgtatatatgtgtatatatatgtgtatatatgtgtgtatatgtgtatatatatgtgtatatatgtgtgtatatatgtatatatatgtgtatatatgtgtgtatatatgtatatatgtgtatatatgtatatatatgtgtatatatatgtatatatgtgtatatatatgtatatatatgtgtatatatatgtatatatatgtgtatatatatgtgtatatgtatatatgtgtatatatgtgtgtatatgtgtatatatgtgtatatatgtatatatatgtgtatatatgtgtatatatgtgtatatatgtgtatatatatataaaacatgacaactaacatgtatttagtgctttctataggtactatgttaaatactatacattattattgcacttaagaatcatattaatcttgttagtgattattataaatccataaaatagatgaagaatttgagacacaagaaaactcccccaaagtacactgctacagcattgcacaacacagattggagcctgactccttttaccgcagagcttcattgcatcaatagtactcaattctgtctttgtgtatagcaagtgagaattagtgtgacagattcttacagaaatagcagtttgaaattgattttagcagcatattacattactacagcataacaagtatgaccataaaaataactttcctttagattcttagataatcctcttcaatatatcattttctccttgtaaagacggttttagtctatttaatgctgtagcaaaatatgtctgctatttagcattgatcttctcataaaatgctcatgcacttcgatgatgacgtatgtcagagcaaaagtccccagccatttagtgttcatcacagcctgctagattggcctcagttggcacacctgtatggttcctctcatgggaaataggaaagaactctgaggaggattctttcattacccaaaagagaaaatgtaggattcctagaaagatatgtgagttagtataaaatttgtctatgagtgacagataattccaaataaagtggctttaagaagaaaagagcttatttctcccatataaataatgcttgagggtgagtgggttaggacaatatggctgcttttctccatggaatcttcagatgtaggtttcttccagatctctgatcccttgtcccaagcctttgtcttcatgttccagaatatcagtgtctgtgtcccagtcagcagactggaaaagaagagagcaaggggttcattcatctatcgaccattcttagggaagcttcctgcattctttttttaaaaaataacaaatagctttattgaggtgtatattgagctttattgagtttgagtttaattgataaagaacttcacatatttaatgtgtacaatttgctgagttgggacacataccgtcaccacaatcaaagtgacaatctgactctgtgtccccacccaaatctcatctcattgtaatccccataatcgccacatgtcgagggagggacctggtgggagatgattggatcttggggtagtttcccccatgctgttatcatgatagtgagtgagttctcacgagatctgatggttttataagtgcttaacagtttctccttcacacatgctctctctctcctgccaccatgtaagatgtacttgcttctccttcactttccgccatgattgtaagtttcctgaggcctcctagccgtgctttctgttacacctgcagaactgtgagttgattaaacctctttcctttacaattacccagtctcaggaagtattctgtatagcagtgtgaaaacagactaataaacaaggtaatagagtttcattgtgttccccctcatttttgtggtaaggacacttaagatgaaatctactctcttaacaaatttgaagaacacaatattatattgttaactatggacactacgctgtacagcagatctctagaacttactcgtttaacaatctggttcatatcagagagtgcattctgctttttccttttaattgaccataactggctgcaaggatcatggaatctctattatgaatggcccatgtcgagccaaacatactattacaattaaagaagagggaaatgagtaccgtgggtccaatatcattgtctgctgtaggataatagaatacaattacaatctgggaaggaagttatggaaaaaaggaaataatttattaagcactgaatatggcatgtaataaaccaggtttttttgtttgttttgttttgttttttgaggtagggtcttgctttgtcacccaggctggaatgcagtggcataatcatagctcactgtagcctcaaactcctgggctccagtgattctattgcctcagcctcctgagtagctagcactacaggcatgtgctaccataccaggttaatttttaatttttttgtagagatggcatcttgctttgttgcccaggctggtcttgaattcttggccttaaggagtcatactaccttggcctcccaaagtgttggtattacaggtgtaagccatggcatccagccccaaatgctttttagtgtaatatatgctgctcatcatccttttgatggtagtattaggctcattttatgtaagatatgattgagactcagaaaggccatgtttcttactcaagatcatatggtagatggtagagttgggatttgaacctaggtctgattgtacccaccagttgtatttttccttctgaaccatgctgccactctggagggagcaccaaggttcaagtcaggggagttggcagttgaaagactgtgccactgggaagaggaagtgggagacaaactttgccattggagtacctttcatgcacaaagcctcatgttcatggcaaaatttgttcaactaagaaaaaaaaagagatacattttatgcaaggggtaagagaattttatgaaggaataagagagagggagcaggcaaaatagaaagttgagccattaataaattattggtttatacaacttttgaaaatagatttgtatcaaaaatagtttagcaagaacttactctggacttgacgacatgttcgttttgaccaagaaagacctagtaatgcagatgttacagaactttgggagaaaatggtaatattaatgttattaccaagtttatagcaataaaaagagaaatctggttataggtataagagttgttggtcttttagtgtatgtgttcacacatttgaaatcttatcctttgcaaactcatgtttttattcactgaagcttctggcactcagatagcataatctacaatgagggatgtaggtcccagttgtaatgcattgcatttatttgttccaaagttccccttttattttcattttgaaaaatggggtctcactatgtgcccgtgtttgaaaaactattcttcaacttgtaatttaaaagaaaatcaagttgttttgacctttcttattatggtaaaatatatataacaaaatgtaccatgttaaccactttaaagtgtacaattcagtggtattaaagacagttgcagtattggctaatcatcactgctaactatttccaagactttttcatcttcccaaatagaaactatgtacccattaaacactaatgccccttcttcaaaccctggtaacttctattctactttttgtctttataaatttgcatattctaggttattttatttagatgcaattgtacaatagttgtccttttgtgtccttctggcttattttatctaccataatgttttcaagggtcatccaggttgtaacacgtatcagaattttattgctttttgtaactgaataatgttcctttgtatgtatataacacattttgtttatctatgaatctattgacagctgggttgtttccaccttttggtgggaaaatatgaacaataatataaataatgtgaatattgtgaataatgctgctaggaacattagtgcacacatatatgtctgagtcctcaatttcagttcttttggttatatccttaggagtgaaattgctggatagtataataattctatgtttaactttttgaggaacttcctgtttaccatagtggctgcatttttacacttgtattaccagtttacaagggttctaatgtccccacatcctcaccaccacaggttatttttagtttttgttgttgttgttgttgttgttttgttttgttttcataagagccatccttatgagcatgaagtgataccacaccgttgttttgatttgcatttccctattaatgttgagcatcttttcatgtgcaataagcacagtgaataatcatttgtgtatcttctttggagaagtgtctatttaagtccttttgcccatttacaaatttttgtggttgctgttgttgagttgtccagagtacacccttatattattttttttgagacagagtctcaccctgtcacccaggctggagtgcaatggctcaatctcggctcactgcaacctccacctcccgggttcaaatgattctcctgcctcggcctcctgagtagctgggattacaggtgtgtgccaccacacccggctaatttttttatctttgatagagatggggtttcaccatgttggccaggctggtctcaaactcctgacctcatgatctgcctgcttcagggtcccaagtgttgggattacaggcatgagccatggcgcctggccacccttctattattttaactgctcttgttggccatgcaccgtgccagaaaaatatacatttgatcatctagcttattggagagcttggaggtcttgaaaaaccttcactgggtgtagcatattctgttattcccactctacattccctcaggcctgatcatggttccaactctttgacagctttctttggtgcacagggcattctggaagtgcttgagaaataactccctaccttgacagtctcaatcaatgactgatgggaattagtgtataattaactaactaggatgggataacgctgagacacaaattctacactggctcctagagctccgcagcaggattatgtcacatttactctcagtagtaactaccttagtaatgcaccttttatttattttcctttcctggctcgctttcccatttttctggcgtttcctagcatctcctccaaacgaacaacttacacttgagcccttgtctcatgatctgcttctgggaatctgaactaagggaagcacagattatgtgcagggcacaaagaaatagatgtattggatttgggcagaggggggagtttcagcacattccttccattactgtccttccctaggatcttcttcctggaggcccctttccttgttggggtagaatgggaagcacattaacaatgccttacttaccagactatcggtgggcaattaagcagtggttgcaactctcagtgacataataagatcatttactcttgttttccattgcaaactgtttttggcggtctaatttttagtttccatatactttcccaatacaatattccttagttacatcagagagtggcttaatatcaaaggctggacattgtcttaaaataagatggtcttccaaagttttgagtgatagataagtatgaccttatagttaggaatttcacaggcaatttgtcattcgctctttggtactattatgatttccatcttaaagatgagaaaactgagacttaaaataatattggaaacacagtaggcacacaataaatcttaagctttattttttattatattgaaatttttgattctataacataaatgtcattttaatcaataaatgagacaaagacaaaaggctcacttatcagacctgcttttggaagaaaagtggagggaacaactaatttgctagttaaaagactcaggtttcaaatatcctgacgtttttaatgtaggcaaaaaaaattatagcacaagtataggatgtgggagccctggctagacagcagttgaccacaaattttatatgagccaacagtgtgatgtggttactctaatgcaatgtccagcatcattctatgaaggcatctgttcagaaaatgggtgtattcctccttggtcaggtcaaatgtgttcactggaaggaccaacattttaagcgagatgttgctgaagtaggaagctagcagaagactttgagaatggtgaaacattctggaagccctgctatctgagaaacacttgagagcactagtattaactcacctgggtctgagagatacagtccaatgatgagcttgggaataagactgatctgcactgaatttcagcttctctactttgtagctttgtgaccttagacaagagactctctctgtacttcagttccgttttctttaatagggggaaataattcatgccctcatataccctagaaagtccaaataagagactatcagcaaaataattggctcataccaggtgtacagtaaatatcaaccttcagtttttcagatagttggagaattgtcatgtgtattagtccattttcagactgctatgaagaaatttccaagactgggtaatttttaaggaaaaagaggtttaatggactcacagttccacatgactaggtaggcctcacaatcatggcagaaggtgagggaagagcaaaggcatgtcttacatggcagcaggcaagagagcatgtgcaggggaactgccccttgtaaaaccattagatcttgtgagacttactcactatcataagaacagcacgggaaaaacccgctcccatgattcaattacctcccactgggtccctcctccccgacacatgaggattatgagagctacaatttaagatgagatttggctggggacacagccaaaccatatcatcatgtgagaagtggtctttcctttgaagacaaaactaggactagtgggtagtaattacaaggagaaaatttcagttcaatattacgactaacctactaataatttaattatcttacaaaatgcagatgcctaaaaatatcaggcttctatctggaacatctgaattgtttggccaactccctacatggcagacatcaaacatagtgaggttaaagcagaattcttgggttacttttattgcctggaaacctagtcatcccccagttttctacatgtcagtaacttgtaccatctcctgctcaggtgctcaagccaggtatcttgacagtgcatgtgattctttttttttttttttaactcatctccaccccatgctgcaaagtcgacctagccagttgtgccaatctaacctccccaaagcataatccaaactcttccacttctctccatttcttgcattgccaccacaatccaaactatcaaaatcttttccctgatctatcataatagccttataattggtttccttgcttctatttctgctgctttggattctattctctctacatgagcaatattttaaaatatgttgtttaaaactgcctaatagatctgattgtgcttagaatagaacacacaatcctcgtcacagcccacaaagcccagcattgaatgatctctgcacccattccaggcttgtctttcagtaccctgaacctagcccatcatctccagcctgcttatttatttttccatgccaagctgattcccaccttagactcttcatcttacctattccttctgcttggaaaacacttatttctgagccccaatgtcatatcctgcaatagaccatcattgaatacccagtctttagtagctatctacacactctcacattattctgttttaatgctttgaattatacttatcactatcttatgattttcttgtttattaatttattacccacacctaaaaatatggatttaacacatagatgcataaacaatgaaactaaatgccccacaaaatagcaggtcccttatcaatgagaatatacaagcaggctttctttggtgaccatatactaccagatgttgtagaaaggattcctgcccttatcagaggtccagctagatgaccactggaatttcttctaatccgcagatcctatgatcttcttgacagtttccatcttcagcaggtcacaagctgttttaagtgtgaaagaattagtgtttttttgcatatttaaaaaaagaaagaaaaaagggaggaagaatgaaagggaagaagaaaagttgctctaggacaagtatgtttgaaaatggatgcgcgcgcacacacaaaatcagttaattagctgatttttatgaattgaccaatgaatttggtcgactattaactaattttagttggtagacctgagctaaatagcacatagactaataaatactggcagttacggatattcattcacacatcagcttttactatgagcagttttcttactatgtcggtctcagatgttgaaatttgtgctcttctataaaaatcaaaaagcagagattcattcttttccatggacttcatctgttccttgtttcaactgcataaatattatttacatgtcatgggtttctgacctctattggtggagaccaaatcgattacccatgagccgctcaatttgcaatcatttaaaattccactctctctggcacagaaaaagaacaatggaaacttgtcatagtgctctctttttggtttatttcctttccctcatttttcttttttattttcccttttcttccccaccagtttctctttttcatttcttcatgtaccaggagtccctaagggacattcagatctttcagcagccatttcattttttatcacaaaattaaaatgtcagatcctttcaagaacccttcagagttacaaggtcagtaaagcccaagtctgctgaatgcaggtgttccagtcttgaaggaggggaccaaggaaagtgactgtcatgtgagtggtgtgtggtttatctaccaagtggcaacatctctcactctcactatgtctgcactgctctgagggtaacctgatctgtctttaatctactctgaccacagagcaaatgttttaaataaaatctctgcatgagtgagtcactactcttctggcttttgtatgacataccaaggactgatggtttactttgcctgagtaacaaaattaatataagagaaacatttttgttatgtggtatcttaaaaaaaaatacaaaaagaagaaaaaggagacatatggacctgagcagtgaaatttggatgaaaaagttccacttgacacggagaaaatattgaaaaaaaatgtagtaaatgcttttttggcagagaaggacaaaaaaaatcagcaggaagaagtagaaagagacactttcactgaacagctgcagtgactctaataccacttatgtaaggtcctaatcttgaagcagcttatttatgttatcatttaaaatgtgatacattatctcaaaagtttttaaatctataggtgcttgtttatttggtagagtctgcattacaatggagggacatgctcgtgtttttgtgggtcctagggaggctggattagagctgaatgcagacattcagtggatgtcttcctctggctcggatagatgaggtgcttatggcatgtacaagtttccatgctattttgcctgacccgaagtatccaccgtttgaagtatcagctcggttttcatgggttctgaagcccagaccaaatgttctacatcgaatgaaaggagtgtgatctgaagacgggcaaagtgtcctggggtgcctcaatgatctcttatgagtgaacacttcatgatgtgtgcagtatagcttgtgtagcaattttaattttccatgaaacgtttctgattacaaaatgaaatggaactgtttttgacccaaatctttctttacccgaagaagacacaacctataaaaacaaagccactctttcccaggttggcaaatcttgcataaaaatagtcccgtgataaaaatggcagacctagctgaggccaaagagggaggtgaaccttagcattcaagagaggacaggtttagagtttccttctatctctgtagctatgacagttattggcagtgcgatctcgggtgagttatttttctgcatagagactcatttctcacatctcaaagtgggctaattctgtctggttccctccatacagtatggataactgcaattatgtatgcacaatcctagcatatttttatcatataatccattaatgactaagtatgatgtaagctgtaggcttttttttggtagatgatttttttttgatgatttttagcttacatagggacgtgtccaattagggattcagtaaatgatattatatttattataaaatatttgctgagagcatctttcaggagtcctttgtctcccttctatctggtatgatattcgtatgcaacattttattcttcaactcaaagtgcagtgtttgatgctctttcagtgatagctctacactttgtttctgaagcaggtgcaaaacttactgtacaaattcagaggaaaggttagattatttttacaaaaatttaattaaatttgactctcagtttctaacttgctggcttagcagggaattgactgtcaatcaaaactggggttcctagggagttgaaggaaagttcccggcatcttaggcagtatagaaaacattcaagggctaaccctggtgtgggcccttgtagaggggctctgctgcttctctgtctgggcattggcatctttggaaagatcaggattgctagtgttctgagtgaagccttcctaggttgatccattcagtctactgaggcctggtcattttctaggaagctgagaggaaacaggtttgggatccctactagtcataggactcaaggatctctgtaacatacctgagtttggggaactatacattttcctatttctctctattcctaatacttcattttctttaatacttctctcacttctttcaccctatatgaaatacacttactatgatctactaaaaaaaaatttagggttttgaagacacaagccaaaaaatgaagttgtcttcagacaacttcagacttctgccttgcaacaggaacactgtcagacaatagagcatgaaagtttgactatttccttgcagggagaaatacagataaacaaaacacacacttttatcattgccaataaacttgccacatgccaatattgaggatgatcaaaaggggcattttgaaaatgttggtttcaatttactttttacaaatttaaaatgagtagagacattctttacttaagattggtagtgggtagttggagaagataactcagaatggattttttaagtaaacttttaaattttggaatagatttaaatttacagaaaaattgtgaaagtagtccagatggtgcccctatgtcatgtgctcagtttcccctatgattaatatcatacatttagcatgggacatttgtcataactgatgaaccaatatgttgatatattaactaaagtccgtatgttattcagatttccctcattttaacctagtgatccttttagcattctatctaggatatcacattatacttactcatgtctcctagtgcctctcttagccgtgacagtttctcagacttttcttattttttttaatagccttaacagtttttatttatttattttaatttttaatttttttatttttttttgagtcagagtcttgctcttgctctgtcatccaggctgtagtgcagcagtgcgatctcggctcactgcaacctctgcctaccagattcaagcaattctcgtgcctcagcctcccgagtacctgggattacaggtgtgcaccaccatgcccggctaatttttgtattttttagtagagacagagtttcaccatgttggccaggctggtcttgaattcctagtctcaagtgatccacttgccttggccccccaaaatgatgggatcacaggtgtgacccatcacatcggtccagccttaacagttttgaggagtagtagtcagtttgtagggtgcatccgtatgcaatttttatgatgttttttcagttatacaggtgttacagattttgaggaggaagaacacagaggtaaagggctattcttattaaatcatatcaaaggtacatggtattaacatgacatcactgttgctgctaactttgatcacttggctgagatgaggtttattaggtttctctactataaagttatgctctccttctctccccaccacagccagctttcctttctttactgtttggaaagaagtcaatatatgtagcttacacttatgggatggggagttatggtctatctctttgaggggaaaattatctcttattccttatttagtgtgatattatgatttataaaaagaaatatatatttggtcttcatccccattttctggcatatggcacctaaaactcttaaaatcccctaactgatgtgtgtttttgcatgctaatgagatggttgatggctcgtggctcctgaggagcctcaggatgggggctagttacagggaaggccaagcctgtgatcagaggactgaggttttcttttcttttcttttcttttctttttttcttttgagacggagtctcgctctgtggcccaggctggagagcagtggtgtgatcctggctcactcaacctctgcctcctggctttaagcgatcctcctgcctcagcctcctgagtagctgcgattacaggaatgcaccaccacgcccagctaatttctgtatttttagtagagatggtgttttgccatgttggccaggctggtcttgaacttctgacttcaggtgatgcacccgcctcggcctcttaaagtgctgagattacaggcgtgagccaccacacccaaccaaggaggactgaaattttcaaccctatcttctgacctccagatagaggtgagaggttgaaggttcagttgaccaccagtggccaatgatgtaatcaatcatgactatataataaagcctccatagaaacccacaaggataattttcagagagcttccaaaatggtgagtatgttagtgaccaggttcaagatgcctgtgtgcagcaagccaattattgagatgacaggttttggaaaaaagaaaagattttatgcacaaggctgccatgcgaggagaagggagagcaaatctcatatctgcttccccaaagatagggttttaaagatatttttgggataaaggtgcaaagtggtccaaaacacggggaaaggtgattggggacaaggaaaagcaaggtatgcttttccagcagaaccaaccctttctcttcttcctcttcttcctcagtctactcaacatgaagactttttaaggagccacttccacttaatgaatagtaaatatattttctcttccttacgattttctactggtctattttgcattgctataaaagaatacctgagactgcataatttatgaagaaaagtggtttatttggctcacagttctgcaggcagtacaagcatggtagttgcatctgcttggcttctcgtgaagcctcaggagtttacaataatggtagaagttgaagggggagtaggcatgtcacatggtaagagaggaagtgagagagatataagtcttctttaagcaaccagctcttacttgaactaatagagtgagaactcactcttcaccaaggggatggcactaagccattcataaggaatccagcctcatgacccaaacatctcccactaggcccacttgcaacattgaggattacatttcagcatgagattcggagggcatgaaacatccaaactacatcacgaggtaattgttgatgtgccatgtgtagtcaagcatcgtggttcttaatagagcatgtgttcagaaaatggtggcattagcatgttccaagggagcacgttttggccctctgatgtcaaaaaaagtcacctcttgggcatttgagcaggcccactcagagagttggtggtttcaactacctttaaccagcctacccccaacccccaattcctgaaaaacaactctaagcagccattaccatggagatgtatatgtcagagatgttatctataagaaagctagtggattgcttagctatgtaacttttagctgcatatgttttaagattaagaagtgactaaaggcaagcaaggcagattaagtttgatgggcttaatcaggttagcccttggtttcaaataggtgaaagtgctgggagggtgggatggctggagagggcaaagaagcttcatgcccctttctccataccctgtcttatgcatctcttccatctagctgttcctgagttgtatctcttgtaatcaaactggtaatccagcaagtaaactgtcttcctgagttctgtgagccattctaacaaatgcttgaacctgagaagggggttgtgggtacctctgatttgtagcccattggatagaagtagtgagtaaccaggggacccaccacttgtggttggtgtctgaagtgaggggcagtcttatgggtctgagcttttaacctgtggggtctgagctaactgcaggtgaatagcgtcagaattgagttgaattgtaggataccttgtttgggtccacagagacctgaaaaatttcttgtggtggaaaaaaacccatacacatttggtgttagaagtgttgtgagtgtagaaaaggaaacaattttgttttttccttatatttatgtgtttatttttttatccattcattcaatgatatttatgtcagtatgcactcataagtatttattttacatgttagggaataattcaatacagtagaccttgaacaacacaggtttaaactgcatgggcccttgtatgtggatttcctcttgcctctgctttgagagagcagaaccaacccttccttttcttcctcttcctcctcttcctcagtcttcctcttcttcctcttcctcctcttcctcagtctactcaacatgaagactttttaatgagccacttctacttaatgaatagtaaatacattttctcttccttacaattttcttttctctaacttattttgttgtaagaatactgtatctatatctatatctagagatatatatacaaaatatgtgttaatctactatctatgttattgctaaggcttccagtcaacagtaggcaattagtagttaagatgttagggagtcaaatgttatacttggatttccaactgcatgggtggtcagtgtccctaatccctgtgttgttcaaaggtcaacagtgttatgttatttattttactcagattgtttcagcttttatattcaatgaaaatttcctatgctttttcctcagtgcccacccaatccctttcctttataaaaaatgatatttatttaagattagtgggctgggcgcagcggctcacgcctgtaatcccagcactttgggaggccgaggcaggtggatcacctgaggtcaggagtttgagaccagcctggtcaacatggcgaaactccgtctctactaaaaatacaaaaattagctggatgtggtggcaggcgcctgtaatcccagctactcgggagactgaggcaggagaatcacttgaacccaggaggcggaggttgcaatgtgccgagatcgcgccattgcactccagcatggggggcaagagcgagactccaaaaaaaaaaaaaaaattaatgaattctaatttctgtaaaacatctaattccaggtgatttttaggactgaaggaaacaaataagttagtgttggcacgtcaagaatgtgcccatgaaccacgcatttgaagttgtgaactcagcatgaccaacttaaaattttcaagtaaatttacttttgccagatgaccactccctgtttttataaggaagaaaaaaacaacctctactaaggtctgaaatatcaaatggctctaaaaagcaatatttgattgatgaaagtttaagggattagatatggatggatttgatttccttcaaaatacacacaaattgtgaaattaaggtataagagaggattaaggcacagcctgtcttaggtttttttttttttttttttttttttgcttctcaaaaccttttgaaaatgatttaagatacttgagcattaccaaaataatcttggggagtatcttctggtatgttcttatattgtcctctgtaacttatatttaataaccaggctgttaaaagttttcaataaagttgtaatccagggtcattacactttagaagtagattaattaagacctatgataacctgatatttcatgtgggaccatgtatattaagttttacttatagatttctctggcttctggtgttgtccaagatgaaataatgtaagcctgtctcctccactgatgacaactaaaaatgtttggataaaacaaaacaataaaatcaactctctgaagttacttaaaagtcaacaaaactagagtgttgtggaatacagtaaaacactggagaagtgaaccttaagggaatgtgtttttgctgctgttgttcttcactttttttgtttttgagatgaagtctcactcttgtcccccaggctggagtgcaaaggcacaatctcggctcactgcaacctccgcctcctgagttcaagtgattctcctgcctcagcctcctgaagagttaggattacaggcgcctgccaccatgcctggctaatttttgtatttttagtagagatggggtttcgccatgttggccaggctggtctccaactcctgacctcaggtgatccgcccgcctcggcctcccaaagtgctgggattacaggcatgagacaccacgcctggcctgttcttcactcttatagtcctgaactatgcaatggaggtgcaattggaggtgaaaaccccaatagcaaccttatttatttaccttaagggagcagaaaaagctgtccctgtagtctgaataatgtgagcagatgtctattttatttctttttttttctcttgttttgctttgaaggcaggcctcagtgacagagaagcatgaaattgtcagtgcaggcagctaaaactcagacagaagtcttatcttcccagccagagcaaccaggaaaaaaaacagtctatgagttcatgggggtgtgggggcatcacagagagcagatggctgaagaagacaatgcctaattctgtgtctggacccccaaaggtccaaggcttatctctgagcagcacatctgagagatacatctgagagatagaccaaacaacatagcaaaggccttgagaactgaatgaagatttaaaccattgcccaagtttcaggctaatccctgagtggtgcatctacgggacagacccaaagcagcacagcacagcctttgacagcagagctgagtttaagatcactgaacacaaaaagtgagaccaacatgcattataaatccaactgcatttattgctggctacaacaaatgaacataacccaatagatttttatcaaaatctagagcttaagcaacataattttaaaaatgtccaggatataattcaaaattagtccataaagaaagaagcagaaaaaggtgactaattctcaagagaaaagataattaatcgattaaatttctagcttaaataaatgttggaagcatcagacaaagtattggtaaacacacttgaaatgaacagaaagaaattctaatctgagaaatagaaatgattccaaggcaaataaagcagtagcctgtgagtgtaatgccagcactttgggaggctgaggtgagagaattgcttgagcccaggagttccagaccagcctgggcaacatggtgaaacctcatctgtataaaaaatacaaaaattagccaggcacggtggcatgcacctgtagtcccagctacttaggaggctgaggtgggaggatcacttgagcttgggacgcagaggtttcagtgagctgagattgtgtcactgaactccagcccaggcaacggagcccctgttaaaaaaaaaaaaaaggcaataaaaattccataactgtaaaagacaatatctaaagtaaaacagccaccatatagacccaattccagaatgggcatgagaaaaaatgtcagtgaatttgaagctagattaatagaaattattcaatatgaagaaaagggagattaatttattaggatactaatgaacagagtctctcacacctatagaataatataaaaaattttcatgtatcattggagtttcagaatgataggaaaaaggttgattgagagaatatgtctaaggtaataatggtttaaaactccccaaatatgggggaagacaaacatttacagattcaagaagttcagcaaaccccaaactgaataaatgcaaaggaatccatgcccagacatatcatagtcaaaatgctgggacaaaaatacaaacaaagacaaaaatatctcgaaagaagctagtgaaaaatgacatgttgtatgcaagagaaaacgcaatctgaatgaacaaaaatcattgggaccagtaagccagtggcacataacaaaagatagaaaacaaaacacaaacctattaatccagaattcccagagaaactttcttttaaaaatgaaggcaaaataaaacatatttgatgaagtgaaactaagaaaattcatcactaataaacctgctctaaaatgagtgctaaataaagttctttagaatgaagagaaacaataaagaataaacagtaaaagtgacaaatgtctaggtcaatattagaatgagtttttctcctcttgagttctttaaggtctgcattactcttgaaaacaaaatctacaacattttccgatttgcttttcagtatatgtagatatacgtttgacgaatgtaagtgggagggtaaaggcatctatatattaggaaggcttctacattttacttgaaatattaaattattaactctagatctaaccatgaaaggttagatgtatatagtaaaacttagagtagccactatacaaatttatataatgaggtataaataaaagcttagtagataaactaaatggaatattaaaatactcaaacaattttttaaaaggcagaaaagggaaactgagggggaaaaacagcagagacaagagaaaacaaataataaaattataggcctaaattcaaccatatcaataaatacattaaatgtaaatgacctgaacaaattaattaacagattgtctaattgaattaaaaaagagataattcccaactatatgatgcctacactttaaatatcaagacatagataggttagaagcaaaaggaagaaaacataaacaaccttttttcccaggaattgctataagaagtacacagaaaaccagtaagactatagaattccagaacaacactatcaatcaacttatctaatgtttattgaatactccacccaacaacagcagaaaacatgttttttccaagcacataggaaacagttaccaagatagttcaagatggaccataaaacaagtcttagcatatttaaaataattgaaattaatcaaactgtgctctctgatggaattaaacctgaaatgaattacagaaaagtatacggaaattttttaaatatttgggaatttaaaaagactaccatggtcaaagaggaattttcagagaaaattagaaaatattaggaatgagatgaaatgaaaatacaacatatcaaaacttgaggactgagctacagcattgcccagggggaaatttataaactaaatacctgtattagaaaagaagaaatagctgtaatcaataacctgagcttctactataagaaattacaagagtaaattaaaaccaaagaagcagaagaaaggcaataatgattacactgaaaatcaataaaacaacagtgaaaaacagtggagaaaatctataaaagcaaaggttgattctttgaagagatcaacaaattgataaacgcttagctaaaatgactgattaaagagcaaagccacctattagcaaaatcagggatgaaaaaggagacatcactatgaactccgcagaaaataaaatgattatcaagaaatactgtaaaaaattcgtgccaaaaacttggcaatatttcatggcctttaaaataaaatttattttgcatatttaaggtatatcacatgatgttactggttaaatgtggatagtaaaatggttactatagaaaagctaattaccatatccatcatctcacatggttacctttggtgtttttgtttttgttttttgtggcaagagagctaacatctactcatttagcagatagaggaagcggccatgacctaagaaaaccaggcagcctctggaagatggaaaaagcaaagacacagattcttccctggagtctccaacatgcactgctgacactttaatttaatcccagtgaaactcgttgggacttctggcttcccgaactgtaaaattacaaagttgtctttgttttaagccactaaggttgtgataatttgttgtagcaacaataggaaactaatccaccatccaacaatgcattttgttcaacatgttttcattttggtgaaaaatatttttcacaggaaaaagtactgggagaatatacattgaaggatgtcccatatttatcaatgagtaagatcttgattgtatcatttgctaggttttctataatagacatatatttcttctataaaaataaatttttaaagaagaaaatgtagtttctgtgaatttagtcaagatactcaaatgtaatgatgaaatatatgtactctatatcttttcttaaaaaaattgagaaagaacattattgattattgtaatagagtaaccctttttagaaaaaagagcttaaataaaatagcagcttagaacacactaaatttaaaaatttgacaatttagataaaatgggcaaattactagaaagatgcaaattattgttaccaactcaagaagaaagagaaaaatatgaatgtacctataacaagtaaagcaactgaattagtaattaaaaatcttcttatgaaggaaactcctggctcagatgtctttgcttgtgagttacactgaagatttaagaaaaaaaaacaacaaaaaaccaaaaacgaattataccctaagtctttcagaaaataaagggtgaaagaatacttctcggctgggcatggtggctcacgcctgtaataccagcactttaggaggccgaggcaggcagatcacgaggtcaggagaccgagaccatcctggctaacacagtgaaaccctgtctctattaaaaatacaaaaaatttgctggcgtggtggcaggcacctgtagtcccagctactcaggaggctgagggagaagaatcgcttgaacctgggaggtagaggttgcagtgagccgagatcgcaccactgcactccagcctgggtgacagagtgagactcagtctcaaaaaaaaaaaaaaaaagaaaagaaaagaatacttctcagctcattttataaggccaacattaccatgataccaaaaccagacatggacatttcaaaaaatgaacactatagaccaatatcactcataaacatagatgtaaaaattctgaagaaaatactagcaaagtgaatccagtgctatataaaaaggataatatatcatgacctaccggggtttatgccaaatatataagctggttcaatatgcaaaaatcaatcaatgaacttcatcatatcaacagcttggagaaggaaaaccatatgatcttctggataatacttaacacctgttcatggtacaaactctttttttttttttttttttgagagagagtctcactctgtcgtccaggctggagtgcagtgcacgatctcggcttactgtaacctctgcctgtagcgattcttgtgcctcagcctccagagtagctgggattataggcacgcaccaccactcccagctaattttttgtatttttagtagaggcagggtttcatcatgttgcccaggctggtcttgaactcctgagctcaggcaatctacccaccttggcctcccaaagtgctaggattacaggcatgagccaccccgccttgccccatgataaaaactctttatgtaaaccaggggtaggatgaaactttcttatataagataaagagcatatactaaaaggtggcctggcgcttacatcatacttgatgatagaatgttctccctctaatattaaaaacaagacaaggatatctgctctcaccattcctaatccacctcatactggaggtccttgccagtgcaattatgtaagcaaaataaataaaaagcatgtagcttggaaaggaagaactagccatgtttatatttgcagacaacatgattgcctgtgtagagaagtctaaagaatcttcaaaagggtactaaaagtcataatgagcctggcaagattgcaggatacaaagtcaatgtgcaaaaatcaacatatttcaatatattagcattgaaaaaatataaatttaaatttaaaaaataaaatttataatagtaccaaagcattaaatacttaggtatttcagttgcacatgatgatttctaactttaatttgttaatttatttttccagaaaatatttatgagcatataacagcccaagcttgataaatggttgagtaggcctgaataggaattgtttggatgggaacttttacccaatccatagagtaagatggaactggaagtgtaaacacgggagctaatttcattagttgtttttcaagaagagacattttatcttttgaaggtagatttaaagtcaggaattcaagtctgggaaggcagtccaataagacaatggcgaaaaaattgaatccgtgacccagagtagagattttcagactgtgttccatagatccacaaggttctgcagaactgcctcagggtcgtgtgtgtatgtgtgcgtgtaaatgtgagcaaataaggtgtgtgcatatgagtgtatttgtataaatgaggatgtacatgtgattgtgtatgtgtaagtgtgaacaggagtgtgcaaatgcaagtgtgcataaatgtgagcaaatagttgtgtgtgtgtaaatgggtgaatgaggatgtgactgtgtgcatgcatgtgtgcactggggagggggaagaatgcctacttagattctgcctgcactttcctttctcccacgatctcagagcagttttgcttggttgataatttactggagttccatgtaagatttttcttggaaaagttttgtggctaaaaataaatatgaaaacctctgatcaattaagcaaagaaaagatcacaacaatgaacaaggatccccaattgcaggcagcaggtagacagcaaagttctgctcaagaagctggcattggacagagccggaagaatttttccatgaccttatcaggggtaatttgggctttgaggacgggaaccttaactactaaggatctaacggactggtagggagtttagttgttgataggaaaattacagggaactagttagtaacgtcattgaggcaagaacacattttgtgttaaattgggctgtaaaggtctgaaccataaccatgggaaatatgatccagtagactatgacttgagagtggctttggtcccagacaacaggatggggacaaatttgcagtagggtaatacccctatgcaatgcccttcagggggtggtttttggaatagttcgttgagcatcacctcggctatttgtttaaaatgcagatcctgtgctcctccatcaacctactgaatcaggacctcaggctgggatccagaaacctgatctttttaacagagtgcatactggtgaatctgataccctctcgagtgtggaacaacttgccaagtttttcagaattccttgttgctaagaatcatgctggtgcttgttaaacattcagccttttaggcccttttactaaagatgctgagtggagatgaaaccgggtgatttatatgttgagttattcttatcatagttaataccagtgaggaatattgaggtaagaggcaaatttggaaaatttctggcatttattgaagaactattataggtaactcacaaataatattaaaaattattttcaggttttcttcctctcactaggaacagtttcatgaaagtgtcatcatgaacagttccatgagtatgagacaaaaatcaggtgtgacataaagtgtgggttttggtagagacgactaggggcctacttgccattatttgcataaatatgccgtatcatttgcaagttaaatcagctcatatcaaatgccattgatttccatttttgcacagaaaaccattgattaacctcaagggattcttcacttaggtataacccacacatattagaatgttttttgtgcatttcccttggaaatttactggataaaagtaagggctatttccaaaaggagttttggatgtatgctcctttgtttcatatgtaagtgggatgcactgaagtaaacatttctttttgccacacttcattttattttattttaatttctggggtacatgtgcaggatgtgcaggtttgttatataggtaaatgtgtgtcatggtggtttgttgtacctatcaacccatcacctaggtattaagcccagcgtgcattagctatttttcctgatgctctccctcctcctacctccccgcaacaggccccagtatgtgttgttcccctccctgtgtccacatgttctcattgttcagctccctcttataaatgagaacatgtggtgtttggttttctgtttctgttagtttgctgaggataacggcttccagctccatccatgttcctgcaaaggacatgatcttgttcctttttatgactgcatagtattccatggcatatacataccacattttctttatctagtttatcattgatgggcatttggattgattccatgtctttgctgttgtgaatagtgctgcagtgaacatagctgtgcatgtatctttataatagaatgatttacattttttggggtatatacccagtaatgggattgctgggtcaaatggtatttctggttctaggtctttcaggaatcgccacactgtcttccacaatggttgaactaatttacattcccaacaagagtgtaaaagtgttcttatttctccacagccccaccagcatgccatgcttcttaaacattaaggtgcatatgaatcacattgagttcttgataaaatacagattctgatttaatggggctgaggtgggggacgagattctgcatttctattcaacccccaggtgatgccaatgctactggtcctcagactacccttccaacagcaagggactataatacagcattctatcccaggagaggtgactgataaactatatattgctgctgtctgtgagggccattaaggaaactcaaattctgtatgaatttcactcaacagaagttgaatgaatgcgtaaggaaattcgaattttgtatgactttcactcaacagaagatgaatgaaaatgtaccttaccttaaagaaccacagacaggagcagaaagtgcagtcagaaagttaacacaatattatgcaatttcccagagctttgaacaagtgctttgagcaagccttgccaatagaaatctcagcagggaattagcaggtgctgcctctacagatggtctgagaaagtgatgttgggtcacgccaccactgagtgccctgggaactctgaatggggagagcaaccactgagcacaatgattgagatccaaatgcagtatatctacaccctccaattgcccaagcagtatagtttcctgggaccgaggaggaagccaatgcttttgtctggggcaatgaaccgggagatttggggcttctcactattcctgaataactgtgaatttggaatgatactttcatcgcaccatgaaacctggctacgttggaagcctagaaacacttgtgtatagttacagggtgggaatgggtagagaagagagcctacatggtgtcaacgtggagacccctagtaaactgagcttttgatttccaccctggacaatgagggccacataagcaatactcttctaatacaatcaatgaactttcagagttcccttaaaaattgttaccattgtaaatttgacttgaccttttttcttcatgactgccgcaattaagcctcaactgtccatacttctttctgggttgggggaattagtttcatgcagctagtttttcactgtattccttctagtgaatattgtaaagttttatttctcttctacagaatagaatgtgcttacctcaatgtccttggctgcaaaacttagatgagtttttatctcaatagattattagcttttccatagaaagtttaaaattcaaattatgcaacatgacagagtacaaaagctgagaaaatttaatgcagcaaagtctatcttcaaatttcctattatttagtaattttaagtacatgttaattaaagaattttagattttggaattgttattttctaatgaaatttgaatatttggaataaagggactgaagattaggagtctgaagtgagatgtcacattgcagtttctttagtaaacatacaattttcataactctattcatgatttttattgataattattgaaagaaaatacctctctctctctctgtctctgtctctcgttctatcacttattcttcttagtcctttggcagaaaagaaaacccagaggtcggaaaataggaacttcaggtttggagttatacagagccaagtctttaactgtgactggatggttttttaggtttacgtttatttcctgcaaagtgtttctatgccaatttcactgtctttgagtagttaaatggctttctgcaagtagtcaatgtgggtaaatttccttggaattagtctggggaagttaagatcagttgtactgctgatggcttatcagtgtcctagcaggaaaatgtgttcctgatgagtaagccattgagcttgttcaaggcatccaagttggcccagacagatggttagtggcagataagatacattaagaaggtgctgattctattgccttggaattttttgaaacaaattttgtgttcaaaggaaaaacaaacaggcaaatgaacaaacagcaaaaccagaaacaagaacaaactagtctcttaatatacaaaatcaaaggaaaataagtcaaagagatgaatatgtgcattatttcttttagtctaactctccagatggcaattttgtatcagtgttattgagagcatgagctcaccaaattgatatcccacaaggggacatcacactaggacatcctactgagaccttcccttccaggagacattggttgacctatttgctcagacttgaggctgaaggttaaacatcacatagagagttcttacacatcaatttaaaagtttgttggaaatagagtacagacatgcaggaaatgtggaattactattaaacatttgaaaaaatgttcactctgacaagcaagtaattctaatgaaagtaatatgacagcattatttttgggcccattaaagtaaatagcgtaaacaggaagaatatattcaataatgatacccattgaaatcaagtgcccaattaatgaagcaggcattcttctaaacttcttgttgccttggaaattggtgtaactttctttttgttttctttctttctttccttccttccttcctttttctttctttccttccttccttccttccttctttctttttttttcttgagacagagtcttgctctgtcacccagactggagtgcagtggtgtgatcacagctcactgcaacccccgcctcccaggctcaagcgattctcctacctcagcctcaggaatagctaggattacaggcacatgccaccacacccagttaatttttgtatttttagtagaaatggggtttcaccatgttggtcaggctggtcttgaactcctgacctcaggtgatccgaccctctcagccttccaaagtgctgggattacaggcatgagccaccacacctagcccaaattggtataactttctaaaggccaatttggtaatatacgcattcagaatttcaactctttatattattttacctatcctaaaacataaacatgatcatggttttctgcattataatcctctgttggttccctcttaattaaagcagggatcatcaaactttttctgtaaagggcaagatagaaaatattttagggcttgcgggccacgtcgtctctatttcaattactcagctctgctgtcatgcacaaaacagccatagaatacaggtaaactgtgctcaaagaaaatttatttatagacactgaaatttggatttcatataattctcacatcttactagatactattcttatgttttttccaaccattaaagactgtaaaaaccattcttagcttatggttcccaaacaggtggcaggctggatttgggcctctggctccagtttgctgacctatagcttaaagcataaatcccccaaccaccaaatcctttacaacgttctccccaaacaagttatgcacttgcatatcacctgcagctgtgtgcttatgtctgcctttcgctttgcctagaatgtcatctccattgccaccttcctgaaattatttttattacctatgttgacttagagatgagctttgtctccaccacctgggacagagggtgccaggcctgaatagatcttttctgatcaccaaatctccccttaataaaagtagagaagtgctttagtgtattcttctataaaacaaagaaacaaaatctttaaaatgtaaataccagattaaagcaggatttttggtatgatttagtgtgaatcaaagtatatccaatttgaccagtgaaaaccacttagatctcttttgatagcatagggactgaagattgcaggagggtgttggatgactgagtttgtaagaaagattatcaggcaggacaatgggaaaacaggtacagaaaggggaagttgggcatataagcaagcaacaatacatcagggctttgcatggggtagaccttgtttattttcagttggagtgagacaaatagagaaagtggttatgcaactgaacaacaaaacatgtcaatttctcatgatttattactttttacaaaataatttactacagtaaaattacagtaaattactgtttataaagagtaattatctccttataaagagataataaaattggtcaattacatttcattatagtgtttgttaaaatttatgatgtttcaataaatgaattctaaaatatctttttacaaaagccattttgtgaagtgggttgctagtcttgaactcaataacccatacctctgaagagcccaatgatatggaacatgaggtgatactgataataatgctttattgtggtatacatatatatgtattacttactgaattgctgtatgttttatacacatgtatataccttacttaaaataaatatctttgggaaaactaaccttatgaactctcatctataaagtaataaaataatattaatagttaattaccaataactaaatgaatattcccttttttttttttttgagatggagtctcgctctgtcgcccaggctggagtgcagtggcgcaatctcagctcactgcaagctccgcctcccgggttcatgccattctcctgcctcagcctcccaagtagctgggactacaggcgcctaccaccatgcccagctaattttttttttttttttttttttttttttttagtagagatggggtttcaccgtgttagccagggtggtctcgatctcctgacctggtgatccgcccaccttggcctcccaaagtgctgggattacaggcgtgagccactgcgcccggccctaagtaattgtttcttatgtgacaggtactgtctaaatacttcacattcaagatctttttccttgcttaaatattaatcatagaacattccaaacatacaaaagaaaacagaccactattgtgatctggctagtactcaacccccggcttcaacaactaacaattcatggccaaattcattttatctctgcactgataccctcctcccatgttattttgaaagcaatcctagacatcatattatgtcatccgtaatatttctgcttgcatctctaaaagacaaggtctcaaaaatataaaaccacagtgccattatctcacttaaaaataattagcagtagtttcttagtatcatcaaatatctagtcagtgactatttgtattttaaatttttacaaattctttgaattcggatccaaataatttccatgttacaataggttgatatttgaagtctttcaaataacttttaatttataggctccctctcttgctctctctctctgcttctttctctctctctttgcaatttattcatttaataaactgggctattctgtctgtagtctggattttgcagatagtatttcacacggctctgtcctctgagcttcctataaatcgatagttatgtgtaaagacttcatcaaataaatctgaaaattaattggtggtatggttgtgggcagggggaggcttgtgggtagctttagtttcttctggagggagacttattttctttttatgatgtttgtagatgctgttgttagcaacctacatcctaggtgaattcattggggtttgaaaaattcttatagtctaattctaacattttttttcatgcattagctaggaacttctataaagagaaatgcctcatttacaactcttcttccaaatggtacagtttctataggaaaataataaatgctgaatttttttctatgtattttttagttttcaaaataatgaggtagtaagcatcatccaactatgatcaattagtgtgattatttattttggggagattattgtgatctcatatattatacatacatataaaaatgcaggcatgcatacatgaaatacatccttgggatgtgccaatccattgcagttattctccttattggtgttcaaattatcccccactttgaccagcgggagctgattcgggtggctcctgagtgcttttacaagacatctattgtcttctagagggttcttttcatatggtagaattccagtctaatttgtacatttcctgttctatatctgtacacaaccatttctacaagaagccctggttcgtttcagtgggaaaaagtatttggacgctacagtctagtctgtaggggtcatcattgctactgggttggctttcttagtcggcagtactaagaaatatatagatatgttttaaagataaaaaatcatgagtttgtatcgatcttccaattaaaattcacaactacttgaggttttcacttaacctattttgatatcacgtctttatcttctttctccaattcagtaatcctgttctcaataatataggggattatagaattagagtatcacataaatattcatctctttgttcctataatgtacacacaacagtctggaaataacaacatcaatgctaataccaacaatataattatagaaaagagtatacaactttattttttggaagttgtctttgtcctcagcatattacagcgttagagtacacccttccagaatgtgcagacaaattgttgtgttttagagtcacatagtttagtttctctgcatgtgactatgccaccaactatatttgtacctgttatatatttaagactatttatttatttttaaatttcttgacattgcattacaaataactgtattttataattatgtaaaacatttacatggtttcaaaggcaaatatctagaatgaggtagattcatacaaagctaatttcttctcttggtctgtccactccattcttttttttcctgtcatatatgcagattttttaaaaaattaagatttattattttattgtttgttttaagctataagcagatagtttaatgtattcctatatcaacctgtcttatatgagtggtgatacaccaaaacaacttttcttcatcttgttctttttacttcatacacatcaaaatcatgccttggtattatatagagggactccctgtgcgtttgtggaactgcacagtttacatgtgtgaatgtgctgtagattattcagtcagactcctagaggacagttgggttgtttcctgtgttttgctacttgaaagtcttgcagtgtacaatctggtgcatgtaccccttgtgtattgtgtaagtgtggctttgtggatagcttcctagaagtgggattgctgagtgaaacagtagatgcatatatcatattggcatatgttgcaaaattatcctctgttttctattctcaccaacaacattgagactgtttcctcacgacttctacacagagtgttttcaaacttttggcttttgacaaataaataattgagaagaggtagctcaatgtagctttgatttcttttgtgtaggtttgtatttctgttatggtagtcaagagtaacttgcatttctctttctgtgaactttcttttcgttaatctagcccattttttttttattggattgctagtgttttgaatttccctatgtttagaagtgtttcatgttaaaattttatgattaaaaatttaaaatattttaatattttgtcatttgtcttttagtttaattctggtaatcttctgctgtgtaaaagttttaatttttgttttatcaaatttatctttccaatttcttatgtctttaagacttcagtcatagaaaagcttctcttactttcaggttgtaaaggaattcacttctagtaccacagatttaaatttttacatttaaatagcttatccatctggaatttgtcctggagtatgatatgagaaaaggatccagtgctattttgttcaaatggttacccagttagctcaacacaacttattaaatagtccatctttaactcaatgatatgatatgctgcttttacagcatattaaatttgtacctttaattgggtatatttctggattttctaataactcccattagtttgtgacaatttttgtattgttagtatactgttttaattctagagaattcatagtacgccttgatattggcagggctctcttctctcactactacatattcatctttattcatggtattctttactatttttgcttatttgtttttccaaataacctgaataatcaactcataaagtccggctttaaagcaaaatctgataccgtttgttggaattgcataaatttataaattagtttagattaaatagacatctatattgatgcataacaaaaaattgtagcaatatgatttttaaaaatcagagatatataatcataaaatatttgttttagctctagtgttaatcgtcaagtttaacatcttagcctaaggcttttaaaaatataggatatatattaatataagtgatacggtttgatttgtagcataatttcatttgtttaacaataatttataatccagtttttctatatttggttctattcataattcggaagtcaaagtggtccactcaataaaatgcaaagatcgtgggtacttttctttcatttttctatttgaaagaagtttcttggttttatgatggagaatggatgtctaggcacagctttacaaaaaaaatctgctttcttgctatttatgcatcctcaacaagataattagctacaatgaaattaaaatgcaatgagtctgtctgaatttttgtcgttgttacttgtgaacttcatctcatcaatgtcaaagattcacattttggaacttactcatcacattgaaattgtatggcttggctgtgatggattggatttaccatgactttcatccatgcctaattcgagtatatgaatcttgcattttttttcattcacgcgtcattacacaagctatccttgagatgtattcaatgtgtcagaataaaacgagtgctttcaaagtctagaaaaaaataggtatatcaaagttcaaactcaatgcaataaataataatagcaaatttactttttaaagtatttacaatttggcagattcttcccaagtgtttgttgtatattaactcatgtaatctttgcaataatctaaaaatgtaagactatttcctaattctataaatggagcccaactcacacagttggtaagtgagatttgaactctggcagtttggcacagaggcctgtttgtaatcattatactctacagcctttatgtgttagaagacctcctcttcatgtaaaaagcatgcacagtgtaagacattgggggttaaaatgatgataaagacaaatgtaatctctttcctcttggagggagcctggatgtagactagaaagaacagtctgtctatatatctatcaagcaaagcaagagcttgaccttctacctgtctgttcattttctataaactatagatagatatatagatatagatatatagagatatagatagatatatagatacagatagatagatagatatagatgtatttacttcctatatcctgaagacttgcaagtctatatcttcaatttgaacctttctcctgagcctgagactcatttttcaacaacataatgagcatctccacttttatgttacatgaaattcagcatatctaaatgtaaatatatatatataggattcagcaacacagacaaaattcatgtccttgaagacagtagtatcagaaggctgttggtacagaaactggatcgtagtgggataaggagtaactagtgggaggggaaatagaaacagtgaagtgaatctgtttattaaagaggcctggcagtaacagaaagtattaggttagtgcaaaaaacacaaaatgtgcaattatttttcaccaacctaataggaaggacagtagcaagagggagggggagataagataaatatttttttaatttgttaaataacttttattttaggtttggagtacatgcacaagtttgttatatagataaattgcatgtcatgggggtttggtgtacaaattatttcgtcacccaggtaatgagcctagtacctgatgggtacttttttaaccctctgtctgcttccactctccatcctcaagaaggcccctgtgtctgttgtttctttctttgtgtccatatgttctcaatgtttagctcccacttataagtgagaacattcactatttgtttttctgttcctgtgttagtttgcttaggataatggccttcagctctatccatggtgctgcaaagaacatgatcttattcttttttatggctgcatagtatttcatggtgtatatgtaccacatttctttatctagtctactgttgatgggcatttttgttgattccatgtcttcactattgtgaacagtggtgccatgaacatacacatgcatgtgtattaatggcaaaaaattgatattcctttgggtatatacccaataatgggattactagacaggcaacccacaaaatgggagaaaatttttgcaacctactcatctgacaaagggctaatatccagaatctacaatgaactcaaacaaatttacaagaaaaaaacaaccccatcaaaaagtgggcaaaggacatgaacagacacttctcaaaagaagacatttatgcagccaaaaaacacatgaaaaaatgctcaccatcactggctatcagagaaatgcaaatcaaaaccacaatgaaatatcatctcacaccagttagaatggcaatccttaaaaagtcaggaaataacaggtgctggagaggatgtggagaaataggaacacttttacactgttggtgggactgtaaactagttcaaccattgtggaagtcagtgtggcggttcctcaggaatctagaactagaaataccatttgacccagccatcccattactgggtatatacccaaaggactataaatcatgctgctataaagacacatgcacacgtatgtttattgcagcactattcacaatagcaaagacttggaaccaacccaaatgtccaacaatgatagactggattaagaaaatgtggcacatatacaccatggaatactatgcagccataaaaatgatgagttcatgtcctttgtagagacatggatgaaattggaaatcatcattctcagtaaactatcgcaagaacaaaaaaccaaacaccgcatattctcactcataggtgggaattgaacaatgagaacacatggacacaggaaggggaacatcacactctggggactgttgtggggtggggtgaggggggagggatagcattgggagatatacctaatgctaaatgacgagttagtgggtgcagcgcaccagcatgtctacatgtatacatatgtaactaacctgcacaatgtgcacatgtaccctaaaacttaaagtataataataaaaaaaaagaaaaaaaaatagattgaatagtaattctgttttaaggtctttgagaaatcatcaaactggttttgaaaatggctgaaccaacttacagtaccaccagcagtgtataagtgttccattttctcaacaaccttgccagcatctattattttttgattttttaatagtagccattctgagtggtgtgagatggtatctcattgtggtttttttatttctctaatgattaatggtgttgagcattgcttgttggccatgcatatgtcttttttgttttgtttgagacacagtctcattctgttacccaggctggagtgtagtggcatgatcaggtgtcattgcagcctcaacctccaaggatcaggtaatcctcccacctcagcctccatagtagttgggactacaggtgaacaccaccatgcctgactaattttgtattttttgtagcaatcgggtttcaccatgttgcccaggctggtctcaaactcttggtctcaatgggtccaccttcctcagcctcttgaagtgctgggattacaagtgtgagccaccatgtccagcttcttcttttgaaaagtgtctgttcatatcctttgctcactttttaatggggttgtttgcttttgtttgtaaatttgtttaagtttcttacagtttctggatgttaggtctttgttggatgcagagtttgcaaatattttctctcattctgtaggttgcctgtttactgtattgatagctgtgcagaagttcttaaatttaattagatccaatttgttgagttttgtttttgctgcaattgctttttgtgtcttcatcttgaaatctttgccaagttctgtgtccagaatggtatttcctaggttatcttccagagtttttatagttttaggttttaatctaaatatcttgagttgatttttgtatatagggtaaggaaagggtggtcccatttcagtcttctgcatatggacagccaatgatctcaacaccatttattgaatagggggtcttttccctattgattacttttgtcagctttgttgaaaatcagatgattgtaggtgtgtgaaattatttctgggctttctattctgtttccttggcttatgtgtctgcttttgtaccagcaccatggtgttttggttactgttgccttgtagtatagtttgaagttgggaaatgtcatgcctccagctttgttatttctgcttagtgttgccttggctatttgtgctcttttttggtttcactggaatttcaaaatagttttttctaattctgtgaagaatgttattggcaatttgataggaatagcattgaatctggacattgctttaggcactatggccagtttaacaatatagattcttcctatccatgagcatgatgtatttttccatttgtttgtgtcatctctgatttcttcaagcagtattttgtaactttcattgtagagatcttttacctccttggttagctctattcctaggtattttattctttttgaggctattgtaataaaattacattcttgatttggctctgagcttgggtgtcgttggtatacaggaatgctactgatttttgtacattaattttatatcccaaaacttgcctgaagttgtttatcagatcaaggagcttttgggcagagactgtgtggttttctaggaagagaaccatatcctctgcaaacagggatagtctgacttcctctctttctatttggatacttttttttctttctcttgcctgattattctggctaggacttctagtactacgttgaataggaatattgagggcatccttatcttgttctgtttttcaaggggaatacttccagcttttgcacattcagcatattgactgtgggtttgtcataggtggctcatattttgagatatgttcctttgatgcctagtttcttgagggtttttatcatgaagtgatattggattttatggaaagctttttctacatctattgagatgaacatatgggttttgcttttaattctgttaatttggtgaatcacatttattgatttgtgtacgttgaaccaaccttgtctcccaggaatgaagcctacttggttatgaagtcagagaggagtccctcctcctcagtttttttggaatagtttcagtaggaatggtaccagatcttctttatatatctggtagaattcagctatgtatcatctgatcctgagctttttctggttggtaggctttttacttaatcctgattcaattttagaactcgtattgattgttctgagatttattctcttccttgttcaatcttgggagactgcatatttccaggtatttttccatttcttctaggttttctggcttacatgcatggagatactcataatagtctctgaaggtttttgtattttgtggggttagtggtaacatctcccttgtcattttggattgtgtttgtttggattttggattgtctctctttttttctattggtctagcttgaatctatcttattaattctttcaaagaacaagctcttggattcattgatattttgcatacttttgtgcatttcaattttcttcagctctgagttgggttctttgttttttaatttttttttttttttttggtagagacagggtctcatcatgttgcccacactgttcttaaactcttgggctcaagcaatcctcctgcctcaggctcccaaagtgctgggattacaggcatgagtcaccatgcctggcctgattttgattatttcttgtcttctgctagctttagggtttgtttgctcttttttctctaattactctagtctttttttttttttttttgagatggaatctctgtcacccaggacaaagtgcagtggtatgatctcagttcactgcaacctctgcctcccaggttcaagcaattctcctgcctcaccttcctgagtagctgggattatgggcatgtgccaccacacccagctaatttttgtatttttagtagagctggggttttgtcatgttgaccaggctggtcttgaactccagacctcaagtggtctgcccacctcagcttcccaaagtgttgggattataagtgtgagccattacaagtgtgagccaccaaacccggcccaaattcctctagttgtgatgttaggttgttaatttgagatctttctaactttttgatgtggacgtttagtgttataaacttccctgttaatactgctttggctgtgttccagagattctggtatgttgtaccttttttctcattagtatcaaataatttcttgatttctgccttaatttcattttttatccagaagtcattcaggagcaggttgtttaattcccatgtaattgtaaggttttgagtgattttcttagcattgatttctatatttttattgcactatagtttgagagtgtggttggtatgatttcagttttttttaaaaatgtcctgtatattgttttatgcccaattgtgtggtgaattttagagtatgtgccatgtgcagacgggaagaatgtatattctgttgttttgggtggagagttctgtagatgtctattaagtctacttggtcaagtgttgagttaaggtcccagatatgtttgttagttttctgccctgatgatctgtccaatactatcagtgaggtgttgaagtctcctactattattatgtggttatctaagtcttttcataggtctgtaagaacttgctttattaatctgggtgcttctgtgcctatatatttagcacagttaggtcttcttgttgaattgagccctttaccattatgtaatgcccttctttgtcttttttgatctttgttgttttaaagtctgttttgtttgaaattagaatggcaatccctgtattttttctgttttcaatttgcttgataggtttttcttcatccttttactttgagcttatgagtgtcattgcatgtgagatgagtctcctaaagacagcatgccattgggttttgcttctttatccagcttgacactctgtgccttttaattgggggaatttagtccatttacattaaaggttagtattgatatgtgtggatttgatcctgtcatcgtgttgttatctggttattacacagacttgtttgggtggttgctttatagtatcactgagctgtttacttaaatgtatgttttgtagtggctggtaatagtcattcctttctgtttagccgtccctttcagggcctcttgtaaagtaggtctggtggtaactaatcccttatcttttgcttgtccaaaagggatcttatttttccttagcttatgaagcttagtttggctgaatatgaaattcctggttggaaattttttttaagaatgctgatgataggccctcaatttcttctggcttatagagtttctgctgacaggtttgctgttagcttgatgggcttccatttgtaggtgacctacgccttctctctagctgtctttagtattttttgtttcattttgaccttggagcatctgctgacgatgtatgttggggatggtcttcttgtgtagtattttgcaaggattctttgcatttcttgaatttcaatgttgccctttctagcaaggttggggaaattttcatagataataccctgaaatatgttttccaaattggctggtttctcttcctttctttcagggatgtcaaggagtcatacatttggtctatttacataatcccatattttattgttcattcttctttattgttttttctttatttttgtctgactgagttattttggggagccagactttgagctctggtattcttttctcagcttggttgattctgctctcaatagttgtgattacattatgaaattcttgcagtatgttttccagctctatcagatctgtttgtctctttcttataatggccatttcatctataagcttctgtatcattttattttaattcttagtttccttggattgggttttgactttctcctgaatgtcaatgatattattttctatccatattctgaattttatttctgtcattttagtcgttttggcctagttccccaccattgctggggaactagtgcagttgtctggaggtaagaagacactcaggcttttcaagttgccagagttcttaccctggttctttctcgtctttgtgggctggtgtttttttaacccttgaagttgctgtttttttggatggttttttttttcttttatcctctttgatgtcctttggggtttgattatggtataagatgaattccatcaactggctttatttctggaagactttaagggaccaaggctcagctcaggattcctgggctgcatactgtagctctggagggctgctgttggaccctgacttttttcttcagcccctggagtttacaaacctgctgcactgcagggtctgaggtggtcacagaccactggtcacaacactctgatgggtggtgccagccaaagctcttcatcaggcagtggcagtggaatccatgctcattcacatgtgccagcagtggtagcagtgtggtgggatgcattctagttggctgctgtggaacgctggcaggtgcaaaggttccagcctctgggcagtcattccagcagtggcagtgctgcaggggggtgtaggtgctgcaggggggtgcccaccagtgtctgttcacatgttcataccagtgacaatgttggcaccatgaattttttttaaagataagagagtttaaatgttattatgaagtggacaaaaatgggagtaaaaggagagtgaagataattggtaatgagaataaaaatgagtgaaagagagtgaaggtaattggtaatgagaataaaaatgagggaattcagttttctacagaaaagatgtcagattgaataaatgaaaataaaaaacaatatttattcatgaaaagcctctcaccacgctaatttctttacattcatcatttcactgaatcttgtagcaatcctatgaaggaggcattattattactaatttacaaataaagaagtatattcagaaaaattatttaacttgcctaaggccatgcagatagttggtattaaagctggggttctaaagtctgtgcttttttctctacaccacgttgttgtatttagggataagtagttcaccagatagaaaaggcagacagcttggcattccacaaagatcttccaaggcatgaaagcatgtatgatgtagataaatggaaaatcatgttcttcactgtggttagaggagagaataatgatggttgggagtgggaggtgatggtaaagtaggacgaggggaaggatcttggctgctattctaaaaaacaagcaatgaaaagtcaccttccagttttcagcttgggagtagcatgatcagacctgtgtttggaaatagaaaactgttggagaaggaaagtctagaagcagggaaatccacgagagggctatcatagcagcatagagaagagatggcaaatgtcttggttggagcagtgacagcagcataaggagaagaaaacaaattcaagagacactcctgatgtataatgagactgtgtggctgactgcctgggaaaacgcaaagtgactttgagattccacagctaaactggaagctagaaaattatggaatggtgtttttaaatttttgagagaaaatgattttgcacctagaattctatatccatgaatcaagtgaaaatgttagacattcaaatctcaaaaagtttacctcgtttttattcattggtgctactaaagaatgtactcccacaatttaaagtagtaaacaaacacaaagggggacacagggcttgcaattcaaggcggtaaaaggaatctccgggaaggtggtgaaagaagagtccgggatgagagcaaaatagtgaatgtagagagcaactggtctcagttgcaactacagaacaaagaatcccagggatagtctttaagtggctgaaaatggtagaatacctgaaatgtaattgaggagagaatatttctgatggagaatttggatataaaatcgtgattgattggtataaaaataagcaccaacaatataaacaaaacaaaccaaaacaaaataaacatcaactccatgatgatcacacgtatgagacaaagataatatgcttgacctatatgtcatggcttagttgtgaaaaatttttgcatagtaataataatatcatgactgagtactaatctaacaaattttgatatagcaatgttgagagactgcagggagggtgagcatatggagagtagttgttgggggtagaggtagtttaggagttaaaacctcagattttagagtgatagttataaaatataaaattaaatataaatataaaataaaatatagctaagattttatatctcttatagcaaaagccaataggcagatctctaaaactgaaaattaagaaataatattatttgttgctcagatattggaaagtaaataccaaaagaaacatctaagagagtgtaaagtagttgcttctggggaatgggaatacaatacatggattttcaaaatgagttctgtagacccatttaattttttatactacatgaatatatgacaatgataaattacatttctaaaagagaaggcaggatgagaaccaaatgtggggagaccaatatgatgagacagccattgtcagcacgataatttgttattaatatcaacaatgttaacaattattattttaagagggtctggagtggaatagttaggattataaatacaaccaaattaaactgaaagttttgatttctcagttgagcaaatattgatgggatgataaaacccagaaaatacatgttattttcaaatggaatttctatttaaataaaatggacttgatatgtcaactgataattaagttagaatcatagggagagcaagaaaagctactaattgcgaatacattgtaaagtaaaaatattgtgctctagtttaatacattaacatctttaatttgccaaggaattagtaataataatgtccaatttactactgaaaaatcatatgactgctgcagtgtgtaaagaaaggcatctggaattacaaaatccactgtttcctttggaaagagaagggaaatgattggctgaagctgtcaattatctttaaataaacattacctccttggaatcagcaatgtgggattttcttttgttggggagatggtggaaaggaaaaaagcataaaccagtataaacctcattcaaaccactaattttgaagcattttataatatttaaaatttcacagcttggataagttcatttctttctccttttttcttctcccatttattgaaaatcataaaattgagaataaactggacatggaaaagctgtgcgtgcataaaagagtttccaggtttttaaatgtatatatcaagtttctacctactaacaagtgcagtaggaactgggctgagttcccaggggctgaatttatcactggccattcctgatatttggatatagaagatggagctgaacattgagtttcatgctagccacgaggtcattttcatcttccttctctccctcaaactcttttgtctccttcttccatattcttaggctttcattttccatttccttttcattttaatataactaggaatattaaaatgaaagtcctggaaatgaatatttatttttagggccactgctaggtttaaggatgttagaaaaagagtctaataggtgatcatcttttagatttacttttaactaatgcgataaatgtcaatgatgaacctttgggccccataagatttattattatagtttattcattagggtattttatctttttaaaaacatttttattatgtttacttttttgagacatcatagctatagagagaatattaattggtatttgacaaaaaacattttagaaattagaatataacagtagtgatagatgaactaattatctgcactagggttgctatcatacataagcagagtcaaaatatcagccacagttcagcatttgcagaaagttaacatctttaatttgccaaagaattagtaatcatagtgtccaatttactactcactgagaaattatccaaagtatgatttttggaaattattcaaagtataatttttacacaaagtttagcatggtaagaaacaagcaaatggggcaggatacacttatatagaattcttcctttgtagtatcaacctcagtgtagctcttaagtgacaaatgtcatgagtaaatgctttgtgtcttatggtttgagatacactaagttctatgatcccatgcaatttaactacatttaaagtacctcattgacacaactttatttatactgaaaacaacataatcacattatgttaaccttgcctggttattgtgaggattaaatgagatgatgtttgttaaggacttggcataatgcatgtatcatttagcctttttggtataacaaaccactccaaaacttagtagattaaaacaacaaacatgtattatttcttaagaatctctggattgtctgggtgggtcttttgattggaatattttggtgtaggatggcctcactcacatatctggtgactggtttgttttcagttggggtaacagggaagacttgaccattaattttttaccaaccagcagtgtttccaggaacagtaggatatgctagtacccaatgagtaagtacctttcaagtctggtagtatcccatttgctactgctatgatttcactggccatggaaggtcacatcaccaagcccagagtgagggtaagagatgactaactgagagcattgatgcagggacaccagttatttggaccatgtttgtagactgccatccatactgcctgacaagtggtatgtgttttataaatgagttatcttatgaatactttcatccaaaaatatgtcaataacagaagaaaagacatgtttactagggatcaatgggcttctgagataagcttggagagctatacattatactgtctactttctgaataaacacaaacatctcctccaaatatgaatggtatagaaacataggtatttaaatgtatgcattcagaataaactgtgttgctgaaacatattcaatatttactgctttaatctagttccccttcacttactggggacattaaatgtagattaaggacatagacttgggaatgaaattttctggatttagatattggctaactttatagcaatatgagacataagcaggtactcaattctttgtttctcagcatcctcatctgtacaatgagagatattaatagaatgtaactcatgatttggatgagaattaatgagtgtatgtgtgtctagcatttaggacaaaacagcgcctatcacagagtgagcattaactattagccgttattataattatttacaagtgactccgaatcatctaaatgtgaattggattattcatagataactgagcatgctttagtaatgttttctccatgtttctatttaacatgtttttatataattaaaattcaaattttaatattaatcgataatcttagtgttcaataatagactagtagtattgaaaaggagaccttatttctaaagatcagctctagagtaattacctcatttttaagttctcacaatgattgattttctgagaatacggagctggtgaattggctgcctagaactagaatattggtcttgaaacttctttggtgtaacgtattcatttcctactacatgcattactcatgaatgaatacatgacatgaatacatttaattagtaattgaataaatgcagaaacttcaacgttaaaatgttttttttttttaaggtgttggttatggaataattgggagatgcaaagatggctgcctatactttgttcttaatttggggaaggtttaattgagaccttgaatttaaatttgaaaaacttttcatttcaaatttgccataatttattttctctctaatgtaggttttaaacatttttgacccttctaagctgacctttggaattctttaaaaacacacatgtagatgttggggtagcttgatgtcccagtgccttggatcttagaaaggaattcatgttgtgaaataaatatgatccttgttttaagtttgttttggacttaaaggtcattctgcaacaaattagttcacaaagatgacataacagcaaagcaaatagtggcacttggagcagaatttgagcttctgaataaaaattcaaattagccaaaataaaataaaataaaaaagttaaattgaaagtgggtggatagtacacatggcctcagttccagatgtcccttttatgatttcaaggtgacattctgtgactgactgaagtgccaggttaagaagtcagtgtccataagacattgtcaaaaatcccaagcacagtctcatactaaaagatcagttcttttgaaagagagcttttcacttgttttgaagtttctgaacccatgaaaccaaccaaggtggggaatctgggctctttttcccccaccgtctttaccccatctgaattgagtgtttctctaggactgcttccacagtgaggtaaactccagggcagaggggctgctttaaagcaaatgaggcccttaatttatcataaaaatgaagactagttgttaaggttttattggattacaataaaggctcctagcactaggagtctgtggtttgattcccggcatcactgggggagcttgaaatcataaccacagattatagcaatgagcttccaaatttccatatcctaagcaaagatgctgctttcctggagctgatgtggaattacatgctctgtgattttaggatatgtattggaaaattttctgtttggatatcatttcaggagggctgtgattctccaatcacctctgtggtcacagcttcaatgttcttaaaaaaagaaagaaaaataataaagcaaaatgaaacaaaagatgattgttgtaactccctagattctgtcctcttgtacagctcgaatgttttcattaatttttttttctttcagtgagttcagtaaaagttcttaccaggccattttaggttgtagcagtagcttaagcagatcatttaggtctacctctcttcccagactccgtatgataagattgtgttttctgcatgttctcactcataggtgggaattgaacaatgagaacacatggacacaggaaggggaacatcacacactggggcctgttgtggggtggggggaggcgggagagatagctttaggagatatacctaatgctaaatgatgagttaatgggtgcagcacaccaacatggcacatgtatacatatgttacaaacctgcacgttgtgcacatgtaccctaaaacttaaagtataataaaaaaagattgtgttttatcagatagactctaaaatctgccctctctcatgtaaattgtacatatatgttaaaaaacacatacacagatataaaaatcaatccatctacatatatgcgtataccatacatataactacaattatatatttagtgatatgtatggatatatatttatatacttttttagcctggcagagagaccatgttggagcatattgaaatgaaggaatgggtaagtggaaaatgttgcaggtggttcatgactatctgaggccgatggagtgggtggtaaaataatttaccaagatagttgtaggtaaagaaagatttattggccgggcacgtttgtggctcacacctgtaatcccagcactttgggaggccaaggcaggcggatcatgaggtcaggagatcgagaccatcctggctaacacggtgaaaccccgtctctactaaaaatacaaaaaaaattagctgggcgtggtggcaggcacctgtagtcccagctacttgggaggctgaggcaggagaatggcatgaacccaggaggcggagcttgcagtgagccgagattgtgccactgcactccagcctgggtggcagagcgagactccatctcaaaaaaaaaaaaaaaaaaaagaaaaaagaaaaagaaagatttattaaagtatgaaaatatgttgcaagggtgcaatgggcagatgagtaagagaggggctgactgtgaggagacgaaggcttgctggggattttataggatggtgctgtgtgctgaagagggctttgtgcaatactgataacgccaaggttgcagtgagctaacttacaattttctatcagccgtgggtctggtgatagctgggcgccggaagatggtgagttatttgtgcaggagggcatgtcctggaccatgaagaaaggcaagacagactcatagcctatctgctttctctttttgcttttcctcggtcccaccagcctgacttttttttttttttttcctaattaggactccacagaagatataaagagatacattttatttttcttcttgtaagatatatctgattgaactggtaaggaaaaataatgtcaatttgagtttctttctttctcagattcattggcacatatacatgtacttaactgaatgggaacaaaacctgtaaaaactcatacacacccatcatactgcctgaacctcctggctgtatttgttcttcattatctagcctcagaactaccccaacattttaggaagccttgtctttcttttcacagttggagagaaaagcgttgatctgtttgggaaggagaatcagtgcctagcattttgtcttttgcctggtccattgacagtttgcgttttcttcctccacttctgaatatgagcaaatcatttggtgttttctctgcataattaaggtgctcttttctaaaaaagcataatcacagaaaactcagacttaataaggaagtatcttatctcacagaagtggaaatccagaaatagggtcctgggggtactttcactagtggctcaataatgccaccaaggactttggctgattggatttttgttcccaaatttttatttcttctctgtaagaggattaaatgtttctgcctatggtcacatgacttgccctgtccttatgggaagaggattctccactctcttcactcccccaccaacccccttagccctcaccttattgactttgggcttagcccatacataacatgctctggacagtagggagacagcaagcatgacacatccatgtagaaagttttctggagtaggttggccccagttccctttgcaagctgctgccttacgacttctgccaaatgtttctactcttaaggaaacacagaatgagacagcccctttctgcctctggatattgagagcagcaggtctcagtagtggctgctgtttagcctgggtctgaaatgagaagacacttgggggtgaatggaggccagaagtcccacagccctcacatgacaaagggaaagaaaagtgtgtagtgtgttgccttaagccactaacacattggagctgtttatggttgcaggaaaagctaattttagaatccaatgttcttccatacttccatctctgtcactgccagtaaagcctgctttctaaagctcattttccttgtggtgggagaagggcaggagcagattcaagcatcacctccagatgtgacaatagccagaggcagaaaggggctgtattagtctgttttcatgttctggtaaagacataccctagactgggaagataaagaggcttagttggacttacagttccacattgctggggagacctcagaatcatggcagaaggtgaaaggtgctttttacatggtggcagcaggagagaatgaggaagaagcaaaagcagaaccccctgataaatccatcatatctcttgagactaattcactattatgagaatagcatgggaaaaaccagccgcaatgattcaattacctccccctggatccttcccatagcatgtgggaattctgggagatacaattcaagttgagatttgagtggggacacagccaaatcatatcattccacccctggcccctccaaatctcatgtcctcacatttcaaaaccaatcatgccttctcaacagtcccctaaagtcttaactcatttcagcattaacccaaaagtccacagtccaaagtctgatctgagacaaggcaagtcccttctgcctatgagcctgtaaaatcaaaagcaagttagttacttcctagatacaataggggtacaggtattgggtaaatacagccattccaagtgggagaaattggccaaaacaaaggggtcacagggcccaagcaagtccaaaatccagcagggcaatcaaattttaaagctccaaaatgatctcctttgactccacgtctcacatccaggtcacactgatgcaagaggtgggttcccatggtcttgggcatccctgtggctttgcagggtacagcctcccttccagctgctttcatggctggcattgagtgtctgtggctactccaggtgcatggtgcaagctgttggtggatctaccattctggggtctgcagaacagtggccctcttttcacagctccactaggcactgccccagtagagactctatgtggggcctctgaccaaccccacatttcccttccacactgccctagcagaggttctccatgagggcactgcccctgcagcagacttttgcctgagcatccaggtgtttccatagatcttccgaaatctaagcagaggttcccaaacctcaattcttgacttctgtgcacctgcaggctcaacaccacatggaagccactgaggcttgaggcttccaccctctgaaaccacagtccaagctgtatgttggcccctttcagccatggctggagcaactgggacataggtcaccaagtccctaggctgcacacagctcagggaccctgggcctggcccacaaaaccattttgtcctcctgggcctccaggcctgtgatgggaggggctgtcatgaaggtctctgacatggcctggagacattttccccatggtcttggggattaacattaggctccttgctgcttatgcaaatttctgcagcaggcttgaatttctacccagaaaatgggtttttcttttctatcacataggctgcacattttccactttaatgctccgcttcccttataaaactgaatgcctttaacagtacctaagtcacattttgaatgctttgctgctaagtggaaacttcttccaccagacaccctaaatcacctttctcaagttcaaagtcccacaaatctctagggcaggggcaaaatgccaccaatctctttgctaaaacataataagagccacctttactccagttcccaacaagttcctcatctccatctgagaccacctcagcctgaaccttattgtccatattgctatcagcattttgggcaaaggcactcaacaagtctttaggaagttccaaactttcccgcattttcctgtcttcttctgagccctccaaaccattccaacgtctgcctgttatccagttccaaagttgcttccacatttttgggtatcttttcagcaacaccccactctactggtaccaatgtacggtattagtctgttttcatgcagctgataaagacataccctagactgggattaaaaagaggtttaattggacttatagttccacatgcctggggaggcctcagaatcatggcagaaggcagaaggtgcttcttacctggtggcagcaagagagaatgaagaagaagcaaaagtggaaacccctgataaacccatcagatcttgtgagactaattcactctcatgagaaaaacatgggaaagaccagctgccatgattcaattacctctccctgggtccctcccacaacacatgggaattctgggagatacaattcaagttgaggttttggtggggatacagccaaaccatatcagggactgtctcattctgtgtttccttaagagtggaaacattttgcagatgccacatggcaggcctctgttggagcatcagttagtagaactttgccctgaacttcatcattggcaaggaaaacagtatcaccatgactgacccgtgtcaatcagggctccccctcagcaggaatagccgaccctcttttgaatcatacatgtggggtgggatggaggcggtaataattagataccttaacaaaatgaggcttttgccaaccaggaaaaagggagaaatgtaagttgataagcaatcccaaatactcactacactctccttcctctctgacttttcttacacctcttctttgcctttgtcttctctctgaccacccctgtctctctcccacccatgcatcagttatccctgtcatttcctcttttttctttattttgctctttttgtcatcctgttacttgtactctgcttccctcaaaatatgagatattcaggaaagagaggctctggccaggatttattgagaacaattttttcaaatttatgtttgtttctcagtgatatggtttggctgtgtccccacccaaatatcatctttaattgtagctcccataattcccgtgtgttgtgggaagggacccgggggagataattgaatcatgggggtggtttcccccatagtgtcctcatggtagtgaataagtctcatgagatctgatggttttataaaaaggggaaatccctttcacttggttctcattctctgttgtctgtcaccatgtaagacgtgcctttcaccttccaccatgattgagaggcctcccaggccacgtggaactgtgagtccattaaacctctttttctttacaaatttcccagtcttgggtatatctttatcagcggcatgaaaacggactaatacactcacttttagtccagcagagaatcaactcaccaatgcactggtgcaacctgaagtcttggtttctaagaggttctgaattcacctgtatcccaccaagcttctctattcagtcccagaggttttctgggtgccaaccttttgaggattagagagaagagggaactgtttctttgttttcaacttgtaaagtctagaatggagctaggactccaggggaggtgacggtttttggtgagagcactgcctacctctggacagtcctaatattctgagaaacacagtttctaggttttcctgaaatgtcctgtttcccaactttcagccttagttcaaaggccagagcaagagccccagatgataaacttctaggaggcttcaaggaaaggtgaaaagcaggagcttgaacaagcatcgagtattccgttataacacatggatttccagaatagtgttcacaagactgtgttccattgaaggctgttagtaatagttcttaaaaacaaacaaacctgtatgtactgagagtgtttgccaaaatacatcttaagtgttttctctttttaaatccaagtgtgatatgacttcttctttgccataatatcagatatattgattactttctttttcaaaggtagaacagtaccgagattgattgttaagatcctagaaacagacggcctgtattagtcagggttctttagaggcacaggactaataggataaatgtatatatgaaagggaatttattaaggagtattgactcacacaatcacaaggtcaagtcccacaacgggccgtctgcaagctaaggagcaaggaagccagtccgagtcccaaaacctcaaacgtagggaagctgacagtgcagtcttcagtctgtggctgaagggcagagagccactggcaaactactgctgtaggtccaagagtccaaaagctgaagaacttggagtccgatgtttgagggcagaaagcatccagcaagggagaaagatgagggccagaagacttagccagtctagtctttccaagttcctctgcctgtttttatcctagccatgctggtagctgattagacggttcccagccagattaatggcagatctgcctctcctagtccactgactcaaatgttaatctccattggcaacaccctcacagacacacccaggaacaatattttatatccttcaatctatcaagattgacaatactaaccatcacactgcctaagatttatcccacccaaccttatcatttaatatctgtttagctcctttatgcctcagttccctcattgataaatctgggatactaatatgtatagttacgtagcaacaaaatgagatactttatgtagtaaatatcatataagaattcttattttcaatgaatctctttctctttcctccatttcttctcccccatttcttaagccccaaagacagtgttttataatcagttgaatcttcagaagaggcacatctatgtacaatagtcccccactaatccatggggaatatattccaagaccctcagtggatgcctgaaaccttggataacatgagaccctctatgcgttatgtttcttcctatgcatacttactacctatgttaaagtataatttataaattaggcacaagactcttgcacttttgaaccattatgaagtaaaacaaggattacttgaacataacaccacaatacctggacagttgacctgataactgaggtgtctactaagtgactgacaggtgagtagtgtttatagtgtggagatgctggagaaagggatgagtcatgttccaggtggaatagagagggacggcttgagattttatcaatctactcagaatggcatgcaatttgtaactatgaattgtttattttttgaattttccatttaatgtttttggaccctgtttgatagtgggtaactgaaaacacagaaagagaaactgcagataaggggggattactgtacagagacctggaagtatgtacattaaatcatcaggaggaaaaaatataggatgggacatgtctgtaggtataaaacagtctttttgctgttgctctttcttttaaaaaatgcatgtgagcttagatagatatatgtttataaatagagtaatattaggaggttgtcctaaatgattagtattagtcagtattctacagagaaacagaataagtaggatatgtatgtgtttgtgtgtgtgtatgtgtgtgtgtgtgtgtttatgtttataatgagaaattggctcacagattaaggaggctgagaagacttagaatcagctgtccaagttggggatcctagaaatacagtggtataactcaggccaagtccaaaggcctgggagccaatgtcgtagatcccagtccaagggccggagaagatgagatgggatgttcaagctcaaactgtgagggaggaaagaaaaagaatgacttcttcctttctccactttttattctattcagaacctcagtggattggatgatgcccactcacattgggcagagccgtctactttactgagtccactgattcaaatgctgatctgatccagaaacacctccacagacacacccagaaataacattgaatctgggtaccctgtggccagtcaactggacacataaaattaaccaccatcatagtatgaacatggaggatagttctacttcttgtattattttactaaaaatgataggaatatgaataatctttaatttttttgttttcaatattttcatatgacatgtatttaagttattcatgtctatattctttttttttttgagaagttttgctcttgttgcccaggctggagtgcaatggcatgatctcagctccctgcaacctccgcctcctgggttcaagtaattctcctgcctcagcatcccaagtagctgggactacaggtgcatgccagcacaactggctaattttttgtatttttagtagagatgttggccaggctggtcttgaactcttgacctcaggtgatccacccacctcggcctcccaaaagtgcatgtctatattctttatttggcctcacaaattgaagaaatttttacaaagatctccatagaaacatctactgaatcattagaaacttataatgttattattggtaaattggaagggtctgaggaacattaaagttaaaataagggaccatgttatggggcacagagcagcacaccatggtgatgtggttattgattatggagcatgaacaaaaaacagagcagcttttctttttttcccatggcaccactcctgacctgtcccttctagtggtcatagctaacttggggaagactgaataggcatttgtgaatttttgagtgtaggtctgtgtgagaatttgtatcagtcccacccaccccactccagatgtaaggaaacagcagtggcctgagctcttgcaatctcgatcttgcatcttgacatcctttgacattctggagtaccttgtaaatctctttcacctgctgtgatgggggctgtgatatggtatatttttgctaccatgtccaccttctctttcctgctgctaccactgtcccaccacatatttttttttagacaatgtaaatttattgattgacaatcattatgttctgtgtaagaagttaaggaatatctgaaagaatatctgcatgttcataccctagcaatttcacaaatgcatgtgctgttgttaggctaatgtgtgggcagatgtgaaactcacttctttcttataaaattaagttgtttttttttttaaacagggtcttgctctgttgctcaagctggagtgcagtcactcaatttcagctcactgcaacctatgcctcctgggctctagcgatcctcccatcttggcctcccaaagtgctgggattacaggtggcatgggccaccatgcctggtcatgaaacccacttctacaggacaaagtaggaactcctcattatgctgtgcaaggcctttatgatcttctcagtgcccatctccctcttttctctccctatatcccaaccacaaaattgcttgtatgtctgcaattgcagtggtccctcaagcccctatgatttcgtacctgctgttaactcttcataaaacgtcttttgccatcttctttatcttatcaacctgaaaaataatctactagtcctttctgatttcatcttgaagtctgcttccttgtcaaaaccttctttgacctttccaggtagcgttaaatgtttaccatttacatattaaatgtagagttaaatgggcttccattgttcctatggctagtataatctatatccacttactgttatgatttctttgcagtctattaccttggctagatttggtgctgttcagaagtagaaatgatgcactattcattttgaaaatgaacatccagaatatattatgtgcttgacagatgtgtaaataaactcatgatgattaataaatatgtaaatgaataattgtaatacagctttttagcaagtgactacagaagcaaataatctgtaaattaataattgagtcatttaacaaaaatagaaatagatcatttatggagtccataagttgagttctaaggaagtcaattgaaagtcttctattgaagtttcacttctccatttcccatgcatttctcagctgattgaatttcttgagaacaacatcatggatgtgttgttggttctacgatgatgagttttatcaacagttacattacatgggcaatgaaaggcagaatagaaggtccttacattattaacaaagactaaatgtctttaatcaagccagacatgacagatttataaaacagaacaatccactcttctcactaaatttttttaggcaaatacagttattattaataaaatgttatttttattaacatgtaataggcttatatcactacaaatcaggaaataaatttattataagtatctcagttttaatttctaataagataaagcagaactttggttccaagaccatatattctagctcttggggagatagcaccatataatgggctgtctgatcaacatatataccacattttgaaggacaataccccaacatttaggatattaaccccaagctgatgctaaaactagaccttctgatccctttaaaactttgctaagcctgttctggcatctccacctaatttgctataggccattatcctctccagtcatcaaggggctattattccagcaatgtattaggaaaggctcgaggagtctttgccaggaggttaaattttaagtcaaacaaaagttcccttttaccagtaaattaactcctatccaagcttatattgtgcccttcaccatccttagtcccgtgtcctcatttcaatttccaggcattttctcttggttatcccaagtacagagaagccatatccctcagctattttggtgataattcatttcctcccacagcagcaatgcacttcctcacctgggctgtactgagaattgaccctagtttttgatctagaaacaatgaggggagccaaggctcatttttgagcagtcaaataccatcctgcatggcttttgtcttaggcgatagtattcaggtcgtggtatgctcttctttactagtaagggcaaggtgctgtttctgaacacctggagcgttcatcagactccaaagttcaaagttcctaagggcatttaggtagttcaaaattcctaaggtcatcagcctacaaaatttccacttaagtttataggtcctactgctacctttttagccctttgggtttttatctagggaacattgtaagctgtgaattcaatctctttgtaactccgccacttttaagatcaaagcttaggcatgcctttcagcatagtctgtctgctggctgcaggatgtgtaggtttccctacaactctgtagatgcctgtaggctttctggctcctatagcttgccatgagttgatggctagctattccagactgtaattttctttctttaagctgcttaggacatttgacaaaaactattttaactctagaatctttacaatttacattgctcttatatctttccagagctagagaactcccataagctagtgttataaatttccagtgccagagtaaacgcatgataccttctacctggacttgacccaccacaggtgagcatcttagtaagtgtgaggctgcagcccgccaggcttatcatgaccacacttaccatcagcaggaggatgccccttgccattgactggcaagtgattcaattgcagaatcttatcctgagggtaactatcaagggccaattttggtagcaattgtctaaaaagcacaccttcaggaaaggactcaagtataagtagtttttgtgggaggtgaacctgtgaggcacacgtggacagtggggaggtgagacaggaagggagaaaagccaatacagtttaggtgaatgaatgggttatcactatggacaactggggctccatcatcctagagactttctaaaaggccacacagagcatatctcaggagtgttccactgtgggcaaaaaagctgggtctttatttaccagcttctttttttttgaatagcaaatagtttattggtaagtacatgatttcaacgggagtaataaattcacatgaaaaggagacaataattaagtcaaaagaataaatacttactaatcgtcagaaaatctgtggccattagggctggcacgtaaaaatccaaaatcactcagaggccaaatcttaaagaagattcgtcctcttattagtccatacggaataggtccatagtacctggaatccatagaattctgtagattatcaccttctaaccaaacatgacccattggcaccgcaggtctgttctagaattcattcagtttttagggaagtcacagggcttccagaaaaaaaaaaattaaagcatgtcttaaagcataggtgggtgatccattatttcaggaatcctcgggccctaaagaaccctgaagaccctcagccaggacacaggtgggcctttctcacctgggccccaccgtatatttaccagcttctgtgcttccttattgcctggggcaataacttacctggccggtcctcctgcaggctgagctcacacctgtagccagagccacaggcaggaagcggtgcagacagttgaggcagaaaaccatgaatgtgtgtggcaactgccccctgatgctgcaggtgaccttcagggtgggctgaaggatgtgtgcatggcactgacattttgaaagttaggcatgggagcttggccctgatgtgctaaagagcagagattcactaaatatttttgcacactttagtatcttgaaagtagtgtttctaagcacatgcctggcagtataatggaagttactttagagtaggtagagacctgaggcagtgataatggtccaagtataaaggccagagaggctgcaataaggcactggtcattacaatgcagaggaagaacaaatacagaacatcatttacactttttctttcactactatatactattccatactaagaatgtactgtactacgatgaatctcacaaatacagcatagagcatcaaaaaggacaaggtgcaggagaaaatatatggtataatgccatataaaggtaaaagcgtgccacttacatatagtttagagacacgcattgtgtgatgtgggtagcaaaagtataaagaaacttattagaataataaattccaaattcaggacaataattagcttctaagggacagagaggagatataattgggaagtggttctttggggcttcaatcatgttggccggccttccttcctttttctctctgtctctctctctccctgtctctctctctctttctttctttctttttttcagagtctcactctgtcacccaggctggagtgcagtggcacgatcttggctcactgcaacttccacctcctgggttcaagctattctcctgcctcaggctcccaagtagctgggattatagctgcctgccaccacacccggctaatttttgtatttttagtagagatggggtttcaccatgttggccaggctggtcttgaactcctgacctcaggtgatctgcctgcctcagcctcccaaagtgctgggattacaggcatgagccacctcaccctgcccactttatttcttaagctgggtggttggtacattgctgctcattttgtaattatacatttttggcatttctaaatgaactcaagatatgttttaaaacatgttaaagcatagaacttgatgactcagggtataaatagaagaatgagaactagctaagttgattccacaggttcttttttagagggattttttgttttgttttttacttttaactgtattcgacaaatcatagttgcatatacttatggggcacaaactggtgttatgattttttcaatataaagtggaatgaggaaactaagtgaattaacatatttatccactcaaatacttcacctactttgtaatgagagcactagaaatttcctctcttgagatgcataatagtcaattatcagctatattaaacatgatgttctattgattaaaaaaaactcaacttagggtttttacaatatgatttaaaaattatttttttcacacacatgtatacacatatattgacataagacaacagtaaggaaataattctcatgtgttatatctttcttgctgtctatactgaagccccaataataatattttaattaactagtgagttgtaatttccatttgcaaaggattatagaaggcaaaaatcacagaatttagagaaataaatgattaaagtaatttttacaaaaatgtctccaaaaatagcactattaagatgaattttcctcaaacgagccagtcacagagctgcagctaaacattgtgaacaggtttttatcatcagcagctccaagggggagctgtgaaccttctttcttgtaccagttttcgaggaataacagcataatctgcctctgttcttgcacagtagggctaaaaatgactacttatacaatagtgcatgatgaatgacaccaccaatgaatgacaactacaaaagaaacagtatcagtgtattttccgctagttgtggtttcttttaaccactgcctgtctctgctctcactgactgttagtgacgtcaaagtaaaatgcccatgctaagggaaaaatggaaaataactccgagaacatactgagtttcttcacttgcaattaaatccttcaacgtaatgatgtaccaaggcgtaccaagaaagacaaataactcaaatcattttaagagcaccagtgttttctctgagtatttgtgaggtaatgctgaagacagcaatgcaattccacaagaagaaagtcctgactatgaaatttttataaaatgaaagtcaaacctgtttttccctccgaaaatttatgtactaaaatttatgcaacaccatttgtcgtttcgttggactttgaattttgctgtaatttttatgggaagagggactgcatttagtaaaacctaaaaacttaaataaaactgctttttttctgcagccaaataaaataaaaacttaggagatttgctgagaagacatgtctggggtttctggttagtttgtcacaagacaagtcagaaagacttgtcagaatcaaggtacaaccagaaaatccaagtcctcttattcctctcccttagttttaactttgctttgctcttagagaatgggaaaataataacactaatctggatatggtgtttttgatgacactggagaaatgaaatctctttgttataaactttttgtagtcaaaaagagggtttcctgagttttccactgtaccgggagtcatcaacctttcataaagggagtcttgagttcatgatttttgtcttgcatgacaggcattgggagaaggctgtagttggggctattctttcttcatgtgtaattacccctaaaaagattacgtctattagtcattgagaccttactgtgagttaatttaattggatcattaaattgcttttatctttacaaatggcaaggatcagaacacgtattgatccttaaatcaacaaatattatagtgaacaatttgggctgaggcattttaccaggacttaggcaattttttggcggggaggagggtggggaaggggcatggaaaagggagggaaaacatgggagaatgaagtattttgggtgtgtactttggacagctacaagatggcagaaagagtgagatatttaggattttggaaatgcggggtgtgactgagtttgtaggtgtgcgtgcatttgggaggggaatactaccgtctggttctggggccatgaatactaaacatcctacagttgcagtaagatgacacaaataattgtcatgcccacaggctaagtgtgcttttgttgagaaactgatcaaatacacaaactgaactggggaatctacacttctatactttgtattttgctcagagcctcggtggcagtaatagagaatcattgactaattcatctagtgccttaaaccttggtattttcatagtttgttgttgcttgcactggagtccaaaaatcaatgagtcaactgagaggtgaatcaaagcaaagtcagcagcaagggcaggtgactaacttgtgcaaaatatcatcattgatgtccaaagcagcagatctgtatattgtaaaaaaaaaaaaaaaaaaaaaaaacccgtatgattttgtaagcaagccatcaatatctagtaatcctctatcctacattttctcctccactaaccagctccataccatttccttttaaacatcattgacaaagaatgttttaacttaaaaaatgttagcaatactgtagatatctgaggatagtgataaatcactgatagcctatggattaggcattttcccagtggaatcaagacattaaattaaaccacacattgagtgataatgcacctatatgtagcatttctagtacctacagttaatgaagtggttttaatcattcatttcacaatattaacagattgggaccagagcagccagcagatgttttcaattttgggccctttgtttgctgtggaagatgcacctttgctgagcttggctgctgaatggacggccctcgctgagcttgtcagccttaacactggttagtgatttgtgttgggctattaaacgcagaagaaaagcaatgtggtctttttttttcagggaaagaatagatggaatgtccctgaataaatactagaagggcattatgacttttaaaagttggctcgggcaagcatcacttactaatgcctgggaggccccttggagtggaataaatcatgggtaatgatataataattttttaaaaaatatagtgtggaaaaccaatgtctacttgcaaatgtcatatctagtatccaggaaactaacatcaccacattttaagaagggtctgtgtatctaaactaaaaataattcttaatagcctttgctaaaaacaaacagataatttgacaaacagactgcaaacaagcatgaaaagggaatagagcagtttttgcctttgattttaaggatcagtcctggtagaaggagctgatgcccaaaatattccatgcaatttcctaatacttgattcaaatcctttgacgaagaaatgtatcaaggtttgtataattgctgaaagaaatttaaaaaaagaaaacacagccccctccactaccagcaaaactatcaaccaaacaaaaacacattgaaaacagcacagatgtttctaattgcttgagcaaacagcctatgttgagattatttggtgaatacctaaaatgtggtatgttcttgtcctttatctgctaggaaggtcaaagctgaatgaggaacagtagcaaaatattcaaagtgtctcctggtgacacagaagtgtaagtttctgagcaaccttgaggaatcaagtaataggcgaacaccagaacatccaagcatcaagccaaggaggcagtgggcttctaggtatctttcctggtttcatatcatgtctttattccgctgtctgacagcagagagctcaactggcgtatattctctcttatcacaatttggatgattttctttgactttaacaatatgtacaaggaaactcacatctttataccaacaccagttctttcataatattggagttaccaaatagatgggtgttgtttaaaggtgaagtcggagatctcatgaagctgagaagtaaacatagtgaatctgtgtctatacagcttcagattcttcccctgagcacagagtcaatggaaaatattacaaaagtgtgaaaacaatttcccacgggaaaggagggcctaagcagtgtcttagaaggttgccacagctcaagtttttctccgtgcagcaggatgagggctaagcttatcaacttcagctttatatttctggggaattaatcaaactggcagattacaatgatctctcaagagaattactgtatgaaccctttgatagatgtccagttactcaggattacatgaagtttatgagtttctcaggaaattaggtgtgacccttattttgccaaagttaattgcccttgcagtcttggtatattgcaaaacctatcaccagtaggaatttgattgaagtggcttggccccaagctgttgcaccaattgtgatttggggttaagagattaaagtggcagaaagggtagggagaaaaaaaattagaaatttgatacagggctttgcagatttaattttagctctgagaagagagatgccaaccacgggctcattctcagtttaaaccagattaagaatgatctcagatttctcccatctttaagggtttaagattacatgataataatgactgagacgaaaagcaaaaggtcagaggcagaaggccaaattggtgaggctggcctgggttgatgagcagagtggccaggatgggttttagcagacctgaccctgcctccgaaatatctcccccagttcattagtctagtaatttgtccaggtgtgactctgggtggcatggtgttctagctgcagcaccccactgggtccagtctcattgggcccatttttgggtggcaaaacagaaccagaggaatcatcaatagaataataaggagtttgggttctggagagagaatcactagatacaaaatccaggtttactgtttgctagaatattaaggaaatgactcaacctttctgtgcctcaatttcctcatctgtaaacgggaattataaagcaccatctcatagaaattttttaataagtaaattcattttattttcttactgtttgcaccacgtgggaagcaattttatatttcattcactgcggcatccccagtgccagaacactgcctaacacaaagtagatgcttgatatttgttaaaggagtggataaatgtagtgttccttgcaatgcctgggacacattaaacccttagtcaatgttggttgtttgcgtaatttttctttaaagtgaggactttgtttgtctttctactttcaatacccagcacagtgctagaatacagaaagaagatgctgtgtgagggaaaataatactccaatcctccaaagatgaaattagggttaaaacgctggaaaaataccttttctgtgtaacttaacctgagatagttttccatttacaattctctctaccaactctcttggaagaacacagtgtttgtttacaatgatttacctcccttaaggaaattcagcatagtagaaggtccactacgcaaacaccgttaggtcactgttcacttttgcttatagccatggatgtccaatcttttggattccctgggccacattggaagaagaagaattgtcttgggccacatataaaatgcactaacactaccaatagctgatgagctaaagaagcattgcaaacaaaaacttcataacgttttaagaaagtttacaaatttgtgtgaggccacattcaaagttgtcttgggccacatgctgccctcaggccacaggttggacaagcttggtttacgccattaacattcagggagattcaatgctgtgtttggttaaaaaaaaaaagtattaatttaaaaatattcaggtcagcatgattaaaatagtcacaagttacttctatagctttatctgttgtattagctctttgcaggcagctgcaactttgaactggtgaatgctgtttcttagtacagtcattcagtgatgtgttttcaggatctgaatcaaaagaacatttttctgcaatctacacaaacctgtttggcacgtgctcttgtttatggaaaatccaaatgtatatttgtgttcttttggaaggggtgggagttggaagggagctcacacaggagattaagactttatctttccactcggcaagctgaattcttaaagtcctatctgatttcataaagtaagcagaagttggagctcagtctagactctggctgaccagcagacaaaagaaaggtatacactcagctgagggccagtagcagactctacttgaaggatgatctggagtggaagaagaaatcgggccacgatgaagatgccttttccttcactgagtaactaccctttgctggtcacttcatacatactatctcattcatttctcgttactccaagaggtagctatgactatgaaaagtacacagatgaaacaggctcagagagctatttgcctgatattccacagctgagaaatggtagcatcaggaccacaataacatgtaacacatcaaaatatattttttataattttcactatggaaaatctcatatgcatagaagagttgaaagcacatcacaattaactttcctgaacgcatcgctgagtttcaaaaattattaactcataaacaattctattcatctctaccagccttactccagtccttccccacatagcagatgctatgatgtgttatagatagcatatttcattatatatttccaaaagagaaatatttgtttaatgtatagtgaaaacatcactttatacctaaattaaaacaatgatttttaaaaactaccatctaatatccagttggtgtctgaatttgtttgattatggggctgtgattttaacacaggtctacactaagagtttgaggtacaagcgtgtgataaggttggtagatgtagttgaccccctctgaaaatcttgccacaacaattttgtcttaaattcttcaaatagaaacctgcctttgggtcccttgggtccctcagaagcaagtgcctcataggtttctgtattagtcagatttctcactgccataaagaaatacctgagactgggtaatatataaagaaaagaggtttaattgagtcacagttccacatggctggggaggcctcaggaaacttacaatcatggcggaagaggaagaggcacatcttacatggtggtgggtgagagagagtgagcagggaaaactgccttgtaaaaccatcagatctcgtgcgaactcactatcacaagaacagatgggggaaaccgtgcccatgatcaaatcatctcccacctggtccctccctcaacatgtggggattatggagattacaattcgagatgagatttcggtggggacacagagccaaagcataacagtttccattctgtgtttaacaagacagatgtaacaagtaaaggacactaggaaaatatatgattcagctccttgcctcagtccctccaacagataatgggtttctggtggaagagaagaagtgtggtatggagaggaagggtgacaaatcattccccagctgtaaaaaggtaggcatttttactctaagccaggaaataatataactcatgatcacgttgttcttgtcaacatgaagttaagaaatgattatgtaaaggaataaaacatgatctgtgttctagctgtttagttgggttttattgccatttctaataaaagatttcagctaaagcattagatcagtagcctttgatttctaaacttaggtagaaatccagttttgttctttgattctctttccgtgcattcctggaattcatgagttttgccctgaactttctggaagcaagggctgaagtccggacatgacttttcaattaatacaaaccgtagtctctggttctcctcgatgttagcatgtgacatgactggaggcctttattttgcttagtgcagtgaccaagcaaatgagtgcatgctcctgaatatttaacaagcgtgacagcctgtgtggctggagttgcagctggctatgcttagctttttaatctaggtgctttctcaactgataatgcatgttttaccccattagactggattttgtcacgtcacatcaggaatgtgattgtgcttttggatttcaggcagggaaaaagagttacacacaagaccagctgtataatttgcagggcctcgtgctggccttgtgtgcaactattcaaacattaagaatttcaaggaaccatcagcagagcccttttaagattggagacttgtgtagcacatatatgaaattgactctgatcacagagcacatagcatccagctggaaacgaacaggttaatctttgtggtgcttctaaaatgggggaaaataacagagagctgagagtttaactcagtttagttgcagagttatagatgacaagcaaagggtccagtgatccaagacggtccaggtgagagtagtgagaaaatgtctcaggtctcctgagattattttgactaagttcatgagcatgttcccctaatctatgtaggttagacagagcaaggtcagcagttacctggtggtaaattaaagcccaggtaacaagtaaatacaaaggcaagatcaaagcaaaggccctgagggagaggacctgtctgaaaagcagagggaaagtatattcttttcacccacctctctctcctgcttccagccccttcagcagttttccttagagagaaaaaaatgttaacagccaaacaaaaggcccgaagcagatttttttttcacagcctgtgagctgatcttgaactttccaggggtttgtgcttcatagaaaaaacatttaggcatttcctccatgtttttgtatctggaaagggaggcctctctttccaagtgttgactgacatcttagagcttatttctttccagttaaagtggaaaatatcaactaagatttcaaagaaaaggaaatgtaatgtattttctcatcaaatttggcattatctatttgccaggcaggcctttaatcttcagtgcagtatttttccattgtataattctgagttcgccttaaatctgtctctttcaacttcgcttttctaaaatacgaatgtgatttgcccaacttatcttcttttctcatttgtttcctcgatacttttgattatcacttgctagggtttctctagagaagctcactattttgcctctgcaaatattgagtgtaacacagataaagcttctttgttagtgtgaattcattaatgaccttgataaaaagaactttccatgtccagcatgctgggaggactaaaatgatttggggcctgttgatatgaacatacaaataagaaaagtacaataataggccttaaaagtctcattaagtttttaaatgggaaggaaagccagtcacttctgttccagaatctggtagtacagagagtgcctcatactattcttccctccaagaacctaaaagcagacatgggattaatctctagaaatttgtctgaaaaaattatgtgcccatgatgacttttgagctcattctcttaataaatcttacctttctctatatcttctaaatgttgcctttgttcacctcagatgggtatctcctggtttgtcacatccttaagtctgcttttgcttcacaaagtaagttttgatgtatgtcttttgcccatgtcttttgatgactgatttcagttctgtgtataagttatatttccagttttcctgcaccttgctcaacagtgactccttctaaagactgtgtacacagagtctaagacttctatctggtacttcttccttcgtctacctctttttccccctctccattgttccaatctctctaaacttttaaaaatgccttttgaagctggataattctttttagtcatatcatccccttatacggtaaaggtgaaccgcagaagaagagcaagaagacttttgggaaactggtgaaatgaaggcatttgagcaacaactactaatcaaacaacccaatcagtccagacgggggaatttttagcttttggttgctgttgggcagaacccggcaaggtcatgggggcctgcagatggcagactttctggtgaaatggaaagacatataaaggtgtcatggcttcagggagggaaagtgttgtgggataatcctgcatttccacagtcactctgaaaaccctggggttcccagtggaaaattactctatgccgattttggagtgacctatgtgtggagcagggtatagatgagccacctggggattgagcgtcaaatagctgcattcaggaaacctcacccatacacctgttttccatcccaagcatgtggggacgacatggtaacattactgtcttcttgggaaaatatagtttgatttgtagcatgttttcttaatgtcagattaggagcctgggaataaattttaattcatatgaattctctagggttacatggataacagtgagtctttctattcttaggtaatttcatattttctgaaaatgaaaatagccccataaaaaggcaggactttgatttaaaaaaatctttaaaaaaatttcgtccacattctatactccaccacccccaactctgctcctcatttatggtattttactttggtttttgttgaagttaatcttgccattgttatctttctgtcagtcagaatcccacggtggtaatgctgttgatgtattttgttaaacaacaaaaacctttttatacatgacacatatttaaagaaaaaaagtcacctttaagaaggtaaaacaagttgacaaatgtttctttaagtgaaactaattgcatggaatattttatgacatttccatggaaaatgttacaggacatccctagaggatttcaggggaacttttatagctatttcctgctccatcagcattttacagaattttgtggaaagcaggggtggttgccgctgcatctggttagtcgtgggcatcagtttctgttggtccgtggaggagcctaacacacaaacacatttgtgaagattgtcctgagatgacgtcaggaacgaccgtgacctggactggcttaatgagatgctatcgggtcaggtgcagcagggaaaacctatttttcttagtttccttttgacatgaatcactaaggtgctacctacttccttaccattgtcctcagataaaataccttttgaaaatcctcttgtatagtagagactggctactttaacccttttattttattaagatattttaaatatcattaagtgtcaaaacattcagtccttactttactatatcaaagccatactaaaggaatacaaatgagtgtaagtgcaaagcttgtgctccagaaactaataatctgtagccaatcatgtagggttatagctttgttcatgtctgtcgaccatatactgcttttaacttgtagctactgcacttaattccgttgccatttctctgtgaaacaaatgttaacaaacaactataaagactttcacattatcatttcatgaggagcactttaaagtatccaattgattgcacatggtaaggtcatacttatgcaaccattttatattaactattttatatttaaaatgccacttttccctaatttacaaaatgtaattttctaaacacttctacctacaacagtgtgagaatgaataagacagaagctattatcctaattttcatagaagaggaagagtggttaaatcacctgctttagttcccagatttacttgttgaaagggtagacaatagaacccagggattcagattcctaagtctcgaatattttccactgactgaaccatattgattctctggagaaactaattaattgtgtcaatttctcaagatgaggatacaccaatgtgttttgtggtgtctttaagtcattcaacgtgggctatggccctccttggttgctcatatgttgttttccttgtttacatggtggtgtgtctccatgatgccaaaatagctaatcatttcaagatatcctttgaaaaagtaaaaccagtagtgtttagtgtcatggagacaaaacaaccagttgatttgacttttctccattttcaatcagtggttttacagtcatggggaaatagactgtcctttttcatctcatgaggtgttttccaccctccgttctctctctctctcaccctctctgtctctctctcctttttcttcttcttctctctctccatccctttcattctttttatttcttaacacattttattctttttccatcccaggtaacaaatggttactatagaacatttaaaatataaaatatggagaagaaaaattaatataactataatcatatgaaatacatgtaaatttttttctaacatgaaaatgagtattgttcctttctctttcctcgaatcagcttgttgaatttcaactgcatgttggaaattttctctttgttctaatttaattattatatattgcctgatctctgacttcagagatgcttgattaattttttataagatctttatgaagttctcttagatctgacactagttagcagtgagagtggtgttaacctgttttactcactgaacgtgggctaatttgggaaaactgagtcttgggttttgagacactgatcatgtgggattagtgaatacattttgctattcaatattgtgtcataccatgttatgccatgtcacttattcattcactcaagaagtatttattaactacttccttagttctagacactgttctaggtgttgaagattgattatcaaaagatcagacagggcaaggtgcagtgctcactcctgtaatcccagtgctttgagaaggctgaggcaagaggatcacttgaggccaggagtttgagaccaacctgggcaacatagtgaggccccatctctccaaaaaataaaaaaaataaaaatttaccaggtgtggtggcatgcacctatagttctagctactcagcaggctgcagtgagaggattacttaagcccaggaggttgaggctgcactgagttatgatcatgtacctgcaccccagcctgggtgacagagcaaaacgctgtctcttaaaacatcagacaggttggtctctgtattggtggagtccatcaactactaagaaatatatgcatcaagttagtcattacaagttagaacaagtgggaaggagaaatgcacatactgggctaaaagacagatgctaaagctatcattttcatgcaagagttatacttaaatcccatggattttaacatctaatatactcagcctcccaaccccttctgctaataagatatagaaaaggagcaagagaagattaactttaggagttgcctggtatatacttcacacaaacatatataaatctatctatctatctatctatctatctatctatctatctatctatctgtctatctatctcaaggctgactccctgcagggattttaacatctaatatactcagcctcccaaccccttctgctaataaggtataggaaaggagcaagagaagattaactttaggagttgcctggtatatacttcacacaaacatatataaatctatctatctatctgtctgtctgtctgtctatctatctatctatctatctatctatctatctatctatctatctatctatctatctatctcaaggctgactccctgcagggattaaggactgagtgaggaagagtaagtggcagaagatcattaagtcctccctctctcatcttttgtcttgggatttgagagttagagagggcaggtaccactatgtaagcttcccattttattgatgccagcgacattcacataaaaggggcataggacttccctaaagttagagatctctatgactaatgtcttgttaatttgggaggtcaagctttggcagggagcatctatgtggcaagatccttaaaacgagtaatagaatttatagcaattctagatagttccaactggaacagagacctagagacagagtcacacagcttcacataatgggattttaagagcatgtatttcaaaagatgctaagcaagtttcatgctgggactaggatagaaacttggggaaaagtttacatggccacattttaatttctgatgtattttcaaaatgtgtatgatagtcttttggaaaacgctgcaacaagaagaaaaatactgaagtgcacattagaagagttgggtttaattcagatctatcagtaaccatgtgactttgggcaaagcactttgtcttttttgggtctctgtttcttcatctgaaatatgaggattatagctaaattaccactaggatcctttctagctccataattttgtgatgtgagaagaatccaaaatatcctcacagaggagtgaatttgaacaaggcaactccccccatccccccgccatctctcttttaatacttgatggtaatccgaagcccagaacctttgagatattggagggagagtgtcatggaataaaaagagctctgaatttggagctagtccactccacttagtaaatgtgtcaccctgggtgaattatacttactttctgagtctcatgtccctcatttgggaaacaggacaaaaccactcaccctcacaggtccctcatgaggatcacatggggcgttacctatgcaaatgtatcctatggcacctgacacacagcagggttcaactggcagtcttccatccttttctctcatccccttgaatgtggctggctcagtttgctagtgtgatcttagccggacttggcccttataatccaattgtccacaaccttcaacagatattaggctgcctcccagtgattacctgctctggaactctgcctttgatgaaagctggaccgattttaggctgaatttttgtcctggacacctttgctatggagaaactctgatgagactcctggcactataactgtgtgggtcatcagtttgaataatttcctgacttctcattgaatcccagtgagagagtgacacactggacaatgcaatggcagccactgaagtttatgccagatcctcacaatagctttttgggaccatacatccctctactcctgagaatgcatttccttacaccaacactctagggcagcagagtgcagcactctagagcaacactctagggcaccaacactctaggccagctcactctttgactaggcagctatatcagaaaaacccatatggtcccatggctgaagcatgggaaatatattagaaataaaagaataaaaaacaagaaagagtttgagaagggaacaaaaatagaagaaatggaaagtaaaagagggaagggaatagggaggaaggatagatgtcaacaatgttgccaggggctatagattgccttctctgacttggtagaatcaggaaataatgaacaggggaactctcccaaacaacaggctttcaaaagcccagaatattatatttctgtaataatctaatggtgtgggagtggtggagggctctaaatgctaattctataatatgggtccctggactggctgcatcagaatcacctgagggcactgtattacatacagatttctgggcttcaggcccagatggactgaatcagactcctctgatatggggccagggcacatgcctttttcaacaaaggaccccaaatatgctgagcttgcactacattcaccattttacaaatataataagatactgtttcatcttttctcaactagttcgagccactggctaaaaaataccttttttatgttacatcagttctttaggggagaaaaaaggaaaaacaaaaccaacaacaaaacctgggattcagctgaatattgtagatataaatctacaaaaggttcaagatcatgggtatgggtgtatcacaccactgaattatgtgattttaggtaaattaccaataatgagatcataggtggtgaccttcagatttgaggttccatctcttctccagactgtaagagactactcattgtgggaaggaaaaagcaaacacagctgtcttccatcccaaccctgccaccacttgtaagtgactaccccttgtggggcttcgtgcagaccaagcgaggatgctggtgtacccagagcagtcgggcaagccaagccactggaacacagaaggtgggcacggtggtgactcttgcatacctccttatatggagtccgacctgattctcttccccatctgcacgtacatgctctacatcaactaagccaccctcccatgccttctctccatggcccacctttatgtaccacaatttttaaatggttaaaattagatacagttgaattagacatatatgcagagaagttttaaactagtttatcaaagttgtcctacctgtcttcccatttctgtaagctggagtgacctctactgactgcatcttgtgtgtctttgacacccaaagcaaatgccttctggattagtggcatgatcaaatgtgactatttctttccattggctgcattgtactacatgtgcacaaaaaacagaatcatagccaacccacagctgcttatagggcgtgtactgtcattttggtcggattcctggactgtcatccaccatctatcacaagcgtctttcttcaaagggagagtaggaaaataaactttgacttttgcaagcaaagagagcaaagaattggttcaatgatatgaattttattaattatgcaacttttttggagaagagatagaagtctgctccatgtttggaaacaccaaagaatttaacaatttacctcctgatttaagaaaaacttatctcacttgctaatatatgcagctgatttctactcacgagtagcttagaagacatttaggcaagccaaaggtcccaagcatttcaattctgctgctccactggctagaattccaaaatatcttcttgatcctttgttgatggcccaataacaagactttagagaaagagaataacttttctccctttattttataaatataaccttgtttcaaaaaaattcaggcagctaatgaaaatacataccaaagaaaaaataattatacagaggtttattggatggtttttcagtatttatgtttagcaaaataaggttttgataaatgttacaaataattattctaactgaaattgaactgctcgcactgggaatatttcactatttagtgtttttccaatatgaaaacttagtttggatgcaaatttagtttcaggcacctgtgaaggccaccataatctgcaaatgtcagagatgttgggttttagttgctagattaaatactgtatatattgtttatatagttttagttttaaaaatttatttattgagttgcaaagcttagataattactattatttatactatttcttccatctatatggaagaattctgaagtctcaggacaacttttacaataatctgaccctcaacttcatttcaaaagaaaacagagagagggccagtataacgtgctgaagacactggtcagggccttcaggccactctcccttttataaaatatctgccttcaattacagtcttgatgactgatgggaaggcagatctgttagctgcaggtgctcatctgccatggtgaatgggtgtgatcctagttgggctagctgatgctcctaggtactaggacctgagacccagagatcagttaggttgcttacgagaagcaatagtggagctgaggcaatccttgacaaggtctggggcaaatcacattatgcatattcataaaaactaaaatcctatcaagggagctagtctgtggaggggaatagagcatgtattttttatatatgactttgtaacaaattatcatacatttagtagcttaacacaatataagtttattatctcattttttttctatgagttgggaatctgggcagggattattaggttctttgttttagagttttctgattatacaaggctataatcaagatgtcagcttggcactgaagtctcatccaaacattcctctgagaaaggtccactcccaagctttcttacatagttgtcaggatttagttcctagctcaccgtcatctgagagtctcagtttcttgccatgtgtgtctctccttagggcagcttacagcatggcagcttgctttatcaggccagcaatggaagaatctgcaagcaatacaggagttacaatatacagtaatgtaatcttaggagtgacaccccatcacctttgcaatattctattgattggaagcaagacacaggttgtgcccacactcaagggaaggtgcttacacaagtgtgtggctattagaagccaggggtcatattgagggtcatcttaaagagtgtctgccacagagcagaaatagaaaatctaagaagaaagagagagagaagggggtgggatgcgagtatagataaaggaggaggagaaggagaagaggaagaggaagaagaaagaaaccttgatttattgatttttctaattatcatgagggatcagactctacttctcagaaagtgggtcctataaaaatcttctagtaactttatggtaattacttcttttaaatagttttgaaaaattttaattatggtaaaaataggcataacataaattttaccatcataatcatgcttaaacatacacttcactagtattaaattagttcacattgttgtacaagcaatctctagaactttttttatcttgcaaaactgaaactctttgcacatcaagcagcaactcctcattctctccttccccagtctctgtcagccacccttctactttctacaaatttgattactccaggttcttcatataagtggactcatatagtttttgtctttttgtaactggttgacttcacttataaaaatctcctcaagattcattcatgttgtagcatgagacaaaattttcttctttttaaaggctgaataatatgtatatgctatattttatttatccatttgtctgtcagtagatacttgagttgcttccacattttggtaattgtgaacaatgctgccataaatatggatatgtaaatatctctttgagatcctgctttcaattttttttttggtatatatccagtaatgaaattgatggatcatatgataattatatttttaatttttaaagaactgtcatactgttttccacagcagctacactattttacattcccaccaaaaatgcacgagggttccagtttcctcacatcttcatcaacacttgtcattttctgtttttctttttttccttttttttaataatagccatcccagtgggtatgaggtggtatctcattgtggttttgatttgtatttccctaatgattactgatgttgagaatcttttcatatacgtgctgtccatttctatctcttctttggagaaatatctactaagtcctttacccacttttaaactagattttttttttcacgttttaaatacaaactttcacctaagagtgttttgaaatatccagattatgaaaacagagagttttttccttcacacagtacaaaaatgaagaaaattctctattctccacctcaccttacacaaacagacctctccaagaactgaacataaacccaggtgcttaaaatatgtttaggcacagacttttccctagaggggagtgacatggtgggtggggcacaagagtctctgaaggaacttgtacatttcatgcttccagaatttcacttcttccagataccttcctctaacacctgtctcagtctttttctttttatagacacgattaacactaaactgctaaattaagtagaatctctaaagtaaatataacttgaaactatgcaagggacaaagtgttttgttctgagatcactgaagctcatcttggagaagtccatgaggcaggttgcttgctggaaaggccagtacacttttttagcaggttaattccaaagccacatgtagaaaagtttctccccaaagacccagagacagaatcattttactctgcccccactccttccctgtgccccttcctagggctgtacaaagaccccgattgaatgattggatctgtactttgcagtaaaagagaatcagaagccttttctttttccctttttattctccccccctctttttttccactactctaatgaaatttgcagacatggaaaggaaactgagttatttataggagtgggaggaatgtgagtgctaattgtgcttagtctattcctaagtacgtaatctgtttgctattaaattttacaatctttcagcaatatacacattttttaaagacagaacttcataaatctgacaaagaataaccaaagtaaataattctaagggtttaaatcttctaatcaaaatcaggtttaaaattatataaaaaattgtttgtagaattaacttattttgcagcactaacatttcccttcttcctttgactagtttattcatttcttttctagacttgtaaagtttgatacagctactcatggatgatataaattttggggggctggttatcatgcttatgtgcatactaactcacaaggcaaattgggtcaaatgagaagctgttggttgcaagtgtctgaagaaggtgctggggccttgaactctaaattgaacgttttggtaatcaaatagctcaaattattctgcatagcttaaagtcattctggatagaaattatcttgggacataaatttttctcagggttccccatttccgttatctctatctaacaattgcaaaagcctgcttgttaaaaattaaataaatgcttgttaaaaggaactagaaaaaatcataatcattcctaggtaaatttttcatggtggaaattatttcctgtttgaaatttgttttagtttggctgtcaaggttgcaagagacagaaaattactcaaattattttaaggaaagatggcttcattaaaagacaacgaattaaattcataactgaaaaaccactgggaaactaggcaggtatggggggtcatatggaggccctgacacatggctgtttttcctttttctgtgtctttgcacagctccctctgcctccttctgcttttgggtatcaatcaatacaatattcacctgtattcttacatattgtttttctttatactttctgcttgctcatattactttatattatgctttctcataactttggtgtgttgcaatatgtcatatttctgcctaacacatgctgtcatgttgacttcaggttctactgcttagctgccttagtcattcagaattttcagttaaaattcttcagacaggaaacctgatggggtttagtctgacttgttattttgacttgcactccaagccacactgtaggttgctggccagctgatgatttggctgtttttgagttagttgccaatttgttttagtcacctgtggcttgaggtggagggaactgggtcatgtgatccatacaaggattcctcttcaattggagctctaggtaaatcagctattttgaagggtctttcactagtctccagagaaggtggcaaatataaaccagaattaaaataataatcggattttgatcatttgccatttgagtctgtttttcttctgtataagtgagatactatctagtcttgagactgcttggggtagtaacaaatcacccccaaatttagtggcttagaaaaagaaatcattgtttttcttatgattctacagattattgactgggcagtcctgcttcatggagtgtcactgtgggatgtctggaaggccccaaatgtcttcactcacatagctggcaattggtgctggctgtggcctgggagccctactggggctatggaccagggcccttgattctcctctctgtgggcctttgcaggtcgctttttgggtttagtaacagcatggtggctgggtttcatggaggaacagttcaagaagacaagccccagtgtgcaagcacgtattcaaacctccactgcattattcttgctaacatcctattggtcacagctagtcacagggccaagtcagactccaaatggatagagacttacaagtgtatgcatctgagagtcatcgttcaatgggatcccccaaatgtcacattaaatgagataatagatgaaaaatgttttatggtctttaatgcatgtagttaatgctcagtaaacatttgaatagtacttctgttgaaggaaattttgacagttttttttcatcaaaattaaaatggttacatttctgacactttttgttaccatatttgggtatttcttcattcttaaaagattcttcaggattctcaaaatttctatgtggcccagccttctctctttctccaagtgcccccggttcgtgtctccagggaccttacagtaactaagacaaccactgcaaaatagtatttcaggttaggcattcagtgggcccagaatgagatcggttagcttgggaaagcatcgcagaagagaaagccttagaagttcttaggtgaagagaaataaccattctgtcagttctggaatctcttgattttgcagaagaagaaactgaagcttagaaaggaaaagctatctgcctaaaatcaccatcagtgagcaatagagaattggaaccactttttttctgatacattcatccattcacaaatatgtattgagtgttaagcaccatatgacgcttgttatatatggaagaaaacaaaagggatatgccctcaactttgtggcctttatggtctaacctagggtaaagatagtaaataagtgaactaaccatccaaaattgtgatagacactttgaacaaacccaacagagcagaatgatagagaatggtgttggaaacatggagagtcaggaaagggttttctggtgatataaaatttaagctgcatcccaaaggggaactgagagggcgccagccctgagaagatcagaaccacatcccagacagagggagcaatatttgtcaaggtgctgagcctggaacaatttttatgtgttagaggaaataaaaggaaaaaaattccgttagtgggaccactgagaatgaagaggtgagatgcacctgactaacttggagaggtaggggagatgcacctgactaacttggagaggtaggagggatcagaacctgcagggcctttggggtcatggaaagaaatttgaattttattttagatacagtaggaagtcgctgaagtttttaagaaaaagagcaacttaatccaatttatatttttaaaaggcttactcaacacatgttgattgaaaatctatttatttgccaaggactctgccaagtgatattgtagcagaaaaataacatatggctctggagaggcatctatagcataatagattggagtgtgtgtggggggaagaaagacacatccattagtgacaacataagtgtggtaagttacacaacagactgttttctgcgttgctcacaaaatcttcctccgtgaacctgtctgtggtctcactgaaatgacagctttagctggctagtaccatggaacccagtttcccagacataggcaattcatccagggtgagacactggtccaggctggagccattatagaccaggaacacattagaatctcccttaaacattagttaaacaacacagagaatgtaatcattaatggtgatcactgagccttgaagatgataaagccatgaggctattgtttatgttggacactgtgcaatcagaggtggttggtcagctaaaagaagaatcagaagagaggcagacagaaagcagatgagaaacagatcacaatatttgaaaggcatatttaaaaatatagattcctaaggggcttcccagttccaatctttgcaactctgtattcattttagtctttgcctgtgaaatttcttaccacacccttaagggatatcagtgtctctccctgcctcctcatacttgagatgggtctacaaagatttgtaggcttttcatggtcagagaggcaggagaagggtattccaggcaaaaacaatagtctatttaaagggacagaagcataagcattctaaaggcgagctacttcagaaggtggtttcagtaaacactgtatgaaatgttggctgggaataagaagaccaccaagcttgatgactgaagcttagtgaagggaagttgaaaagctatttggaatgaaatctccacttacaagtcaaatagttgatggtgatggaaaaagtataccttactgaattctttaagtaatataaaattcccgtggacaattttcagcaccaaacacactacttggcatttagcaggtattcagtaaatattcgaggtgtgcatattgtctttatttttcatttcctccagttcacagccagtagtaaacaagggcatattacaaattgagatccaagttgggttaagtacacaggtaagcactgaaacatgcaagagtatttgcaataagaagctcaaattctattccaccatgaataataagctgaattccagttggccaatctccattccttcccaaaagtgttgaactggtaacctgctcaccctcattcctcttggaatttacagatgtgtgccggacagtgtgggaaacagtgttttacagcagcaattagtttattcctggggtaaacagtagaactttagggataattgcagcaagaaatttgttccctattgcagtgtgaataacctacaggcagccagttggctgcttgccctacaaatcccaaaaaggacattggcaactgttttgcatttgtgcccagtagggatttgcagatgcacagtggggagaggagaaaagatgggctgtgtttttaccaatgtttgcaaagccaaggatggctttccaggacaggttaattcagaagcgggaaatttgggtttgtgtaaggggacagcttgcttctctttaagatggaagctgcagctcgagtgccagttggcagctcctgagtctgctatagggccaacacacatgcaggcagcagagtcacttaatccctttgactttgctatttcctgcctatgactgtactaagcttgttgaagcctgaagcaacatgtgactatgagattgtgggcagccaggagccagtcttccacagccttggacaaactgactgtaccaccctctacaatttgcttcctagccaaggttggctatttccccaaatttctctttcaggtgtggcattatagagaccattattactgttgttgctgcatttaagagaacacagacacaatagtttccagcttgcttttgtacatagtttccctaaatatgttactatctccagtgcaggctccaatttgaaatgtcatcacaggcagcagcaatgtcacatatttttatggcattttctcttatgatcgttgtgtaattatactttaatatttaggtgtggacattaaggaaggggttatttctgtcatacagaagggaaaaattactaggaaaatacataaaaagttaactttgtagttgatgttggagatagtgatttctattactacagatcatttaatctttccttgtgagtgggagaagtgcagtcttgctttattaattgctaataattttcccatataaactcagagaacctcaaaagtggttactgtgccttctgtatctcttgcctcctaattgatttccctgcatccgtccctgggtccctttcccctatcctcaatctgttctatatacatggcaattctaatcatgacaagcttaaattaatttaatactatcctattatctttgggataaagatcacacgtgcttcctgaggtcagccttcttagcatggccgaaaaggtcctacctgatttggcaccagtatcatctctcaggcactcacaaacccattctccacaattcagtcttttctgctggtcttttcttctgattgtctaatgcatgtgattcttcttgccacaagaccattgcacattccattccagcttcctggaatgctcttcccactggtctctgtaaaagttaactgcttcttatccttcaaatctcagctcatgcttactctcttccctaatttccagacttactcagattaccctgtcactccctcaaacagcatctgtaaatctccttcttaactctgatcacaatctgtcatcctacaagatgactttgtaggatgactttgtagggagtacttagctgatgcctacttttcctcctcaataaagacaaggactctatttccagcactatcatgaccctggtggaggaagaccgtggtgaactctatgcaaagaaagcatgaatcaagtcaagaaggaggtgccaaatttaaagttaaaaagaagcagaatgaaaagcaactgaggaaaacaattctaaaggggctttaaagcaaacaagtcaagatcagtatcaattttagtttgaaggagctgatggacaagatgtgaatttccagtgaagcaggctctgaacttcattttgaagttaaaaattgactcgggttcagagacagcattagagaggtaggatcactcatctccaaacaaagggcattttcttttatttatatatatatataaaacagatatataaatatattatatatatttaataatatatatttaatatttatatgatatatattatatataatttatatattacatatatattacatatatatacaaatatatataaaatatatatatatattacaagttattggggtgcaggtggtatttggttacatgagtaagttctttagtggtgatttgtgagattttggtgcatccatcacccaagcagtatatactgcactatgtttgtagtcttttatccctcgccccatcccactcttcccccaaagtccattgtatcattcttatgcctttgcatcctcatagcttagctcccacatatcagtgaggacatacaatgtttggttttccattcctgagttatttcacttagaataatagtctccaatctcagccaggtcgctgtgaatggcattaattcattcctttttatggctgagtagtattccatcatataaatataccacaatttctttatccactcgttgactgatgggcatttgggttagtctgatgattttgtaattacgaattgtgctgctataaacatgcatgtgcaagtatctttttgtataatgacttcttttcttctgggtaggcacccagtagtaggattgccagatcaaatggttttctacttttcattctttaaggaatctccacactgttttccataggggtagtactagtttacatttccaccaacagtgttgaagtgttccctgttcactgcatccacaccaatatctactgttttttgatttttttattatgctcattcttgcaggagtaaggtgatattgcattgtggttttgagttgcatttccctgattattagtgatgttgagcatttttttatgtttgttggccatttgtatatcttttttgagaattgtctattcatgttcttagcccacttttcaatgggattgtttgtttttttcttactagtttgtttgagttcattgtagattctcaatattagtcttttgtcagatgtatagattgtgattttctctcactttgtgggttgtctgtttactctgctgactgttccatttgccgtgcaaaagttctttagtttagttaagtctcagctatttatctcttcttttttttggcatttgcttttgggttcttggtcatgaaatccttgcctaagccaatatctagaagggtttttacaatgttatcttttagaatttttatagtttcaggtcctaggtttaagtctttaatccaccttgagttgatttttgtataaggtgagagatgaagatccagtttcattctcctacatgtggctagccaattatcccacatcattgttgaaaatggtgtcctttccccactttatgtttttgtttgctttgtcaaaattcagttggctgtaaatatttgggtttatttctgtgtctctattctgttccattggtctatgtacctatttctgtaccagtaccacactgttttggtgactatggccttacagtatagtttgcagtcagatagtgtggtgcctccagatttgttctttttgcttagtcttgctttggctatgtgagctctttcttagttccacatgaattttagaattgttttttctaattctgtgaaaaatgatggtggtattttgatggggattgcattgaatatgtagattgcttttggcagtatggtcattttcacaatattgattctacccctccatgagcatgggatgtgtttccatttgtttgtgttgtctatgatttctttcatcagcgttttgtagttttccttgtagaggtctttcaactccttggttaggtatattcctacttattttatttttattttttgttttgcagctattgtaaaagggtttgtgttcttgattcgattctctgcttggctgctgttggtgtagagaagagctattgatctgtgtacattaatcttgtatctagaaactttgctgacttcttttgtgagttctaggagctttctggtggaaactttgaggttttcaaggtaaacgatcatattgtcagcaaacagagacagtttgacttcctctttactgatttggatgccctttatttctttctcttgtctgattgctctggctatgacttccagtactatgttgaagaggagtggtgacagtgggcatccttgtcttgttccagttctcacagggaatactttcaacttttccccattcagtattatgttggctgtgggtttgtcatagatggcttttattacattagtatgcaaattttgctgagagttttaatcataaagggatactagattttgtcaaatgctttttctgtatctatcgagatgatcatgtgattttatgtgtgtatatttatgtggtcaatcacatttattaacttgcatatgttaaaccatccctgcatccttggtatgaaacccacttgaccatggtggattatctttttgatatgttgttggatttggttagctagtgttttgttaaggattttagcatcaatgttcgtcaaggatattggtctgtagttttttttttcagttatgtcctttcttggttttggtattagggtgatgctggcttcatagaatgagttagggagggtttcttctttctctgtattggggatagtgtcaaaaggattggtaccaattcttctttgaatgtctggtagaattctgctatgaatctgttggtcctggacttttttttttgttgttggtaattttttagtcacaatttcaatctcactgcttgttattagtctgttcagggtatctaattcttcctgatttaagctaagagggttatctttccaggaatttatccatctcttctaggttttctagtttacgtgcataaaggtgttcatagtagccttgaatgatcttttgtatttcagtggtgtcagttgtagtatttcctgtttcatttcttagtgaggttatttggattttctctcttcttttcttggttaatcttgccaatggtctatcaactttatcttttcaaagaatcagctttttgtttcacttattttttgtattttttttgtttcaatttcatttagttctgctctgatcttggttatttcctttcttctgctgggtttcagtttggtttgttcttgtttctctagttcctttaggtgtgaccttagaattcaagtttgtgctctttcagtctttttgaggtaagtgtttaaggctatgaactttcttcttagcattgcctttgctgtatcctagaggtttttataggttgtttcattattgtcattcagttcaattttttaaatttccatcttgattttgtttttgagccaatgctcattcaggagcaggttattttatttctatgtatttgcagggttttgaaggttccttttggggttgatttccagttttattccactgtggtctgagagagtacttgatataatttcaattttcttaaatttatttaagctcgttttatggcctatcatatggtctatcttggagaaagttctatgtgctgttgaatagaatgtgtattatctggttgttgaatgaaatgttttgtatatatctgttaagtccatttattccaaggtatagtttaaatccatggtttctttgttgacttttctgccttgataacctgtctagtgctgccagtgaagcattgaagtctcccattatttcgtgttgctgtctatctcatttcttaggtctattagcaattgttttataaatgtgagagatccagtgttaggtgcatatatgtttaggattgtaatagttttctgttggacaaggccttttaccattatataatgtccctctttgcctcttttaaccactgttgctttaaagtttgttttgtctgatataggaatagttactcctgctcggttttggtgtctatttgcatgaaatgcctttttccacccttttactttaagtttatgtgagtccttatgtgttaggtgagtcttctgaaggcagcagatagttggttggtgagtccttatccatgtgcagttctgcatcttttaagtggaacatttagggcatttacattcaatgttagtattgagatgtgaggtaccattgcattaattgtgctatttgttgcctgtgtactttggtttttttgttttttgtttttgcgttttaacttgtatttttgttttattgggcctgtgtgatttatactttaaagaggttctgttttgatgtgcttccaggatttgtttcaagatttagagctctttttagcagtttttgtagtggtggcttggtagtggtaaattctttcagcaatttttttgtctgaaaaaggctgtatctttctttcatatatgatgcttagtttcactggatacaaaattcttggctgataactgttttgtttgaagaggctgaggatagggccccagtaacttctagcctgtagagtttctgctgagaaatctgctcttaatctgataggttttcctctataggtttcctggtgcttctgtctcacagtccttaagattctttcctttgtcttaactttggataacctgatcacaatgtgcctaggcacattgccatgaatttcccaggtgttctttgtgcttcttgtatttgtatgtctacatctctagcaaggccaggggagtattcctcaattattcccacaaatatgttttccaaacttttagatttctcttcttcctcaggaacaccgattattcttaagtttggttgtttaacataaccccagacttcttggaagctttgttcatattttcttattcttttttctttgtgtttgttggattgggttaactggaagaccttgtctttgagctctgaatttccttctcctacttgttcacttctattgctgagagtttccagggcattttgcatttctataagtgtgtccaatgtttcctgaatttttgattatatttttcttttcttttcttttcttttattattatactttaagttttagggtacatgtgcacattgtgcaggttagttacatatgtatacatgtgccacgctggtgcgctgcacccactaactcgtcatctagcattaggtatatctcccaatgctatccctcccccctccccccaccccacaacagtccccagagtgtgatgttccccttcctgtgtccatgtgatctcattgttcagttcccacctatgagtgagaatatgcagtgtttggttttttgttcttgcgatagtttactgagaatgatgatttccaatttcatccatgtccctacaaaggacatgaactcatcatttttttatggctgcatagtattccatggtgtatatgtgccacattttcttaatccagtctatcattgttggacatttgggttggttccaagtctttgctattgtgaatagtgctgcaataaacatacatgtgcatgtgtctttatagcagcatgatttatagtcctttgggtatatacccagtaatgggatggctgggtcaaatggtatttctagttctagatccctgaggaattgccacactgacttccacaatggttgaactagtttacagtcccaccaacagtgtaaaagtgttcctgtttctccacatcctctccagcacctgttgtttcctgactttttaatgattgccattctaactggtgtgagatggtatctcattgtggttttgatttgcatttctctgatggccagtgatgatgagcattttttcatgtgttttttggctgcataaatgtcttcttttgagaagtgtctgttcatgtcctttgcccaattttgatggggttgtttgtttttttcttgtaaatttgtttgagttcattgtagattctggatattaggccttcgtcagatgagtaggttgcaaaaattttctcccattttgtaggttgcctgttcactctgatggtagtttcttttgctgtgcagaagctctttagtttaattagatcccatttgtcaattttgtcttttgttgccattgcttttggtgttttagacatgaagtccttgcccatgcctatgtcctgaatggtattgtctaggttttcttctagggtttttatggtttcaggtctaacgtttaagtctttaatccatcttgaattgatttttgtgtaaggtgtaaggaagggatccagtttcagctttctacatatggctagccagttttcccagcaccatttattaaatagggaatcctttccccattgcttgtttttctcaggtttgtcaaagatcagatagttgtagatatgcggcgttatttctgagggctctgttctgttccattgatctatatctctgttttggtaccagtaccatgctgttttggttactgtagccttgtagtatagtttgaagtcaggtagtgtgatgcctccagctttgttcttttggcttaggattgacttggtgatgcaggctcttttttggttccatatgaactttaaagtagttttttccaattctgtgaagaaaggcattggtagcttgatggggatggcattgaatctgtaaattaccttgggcagtatggccattttcacgatattgattcttcctacccatgagcatggaatgttcttccatttgtttgtatcctcttttatttcattgagcagtggtttgtagttctccttgaagaggtccttcccatcccttgtaagttgtattcctaggtattttattctctttgaagcaattgtgaatgggagttcactcatgatttggctctctgtttgtctgttgttggtgtataagaatgcttgtgatttttgtacattgattttgtatcctgagactttgctgaagttgcttatcagcttaaggagattttgggctgagacgatggggttttctagatatacaatcatgtcatctgcaaacagggacaatttgacttcctcttttcctaattgaataccctttttaagctatctatttcctttaatatttctcccttcatttcttgtatcattttttggatttccttgcatggtgcttcacttttctctggtgcctccctgattagcttaataactaaccccctgaattctttttcaggtaaaaaggggatttcttttttgtttggatacattgctggtgagctagtatgatttttagggggtgttatagagccttgttttgtcatattatcagaattcgttttctggttccttctcatttgagtaggctctgtcagggggaaggtctagggctgaaggttgttgttcagattcttttgtcccatggaatgttcccttgatgtagttttctcccacttttcttggatgtggcttcctgtgagctaaactcaataattgttgattctcttctaggtctagccacccagtgagtctactcagctccaggctggtactgggggttgtctgcacagagtcctgtgatgtgaaccatctttgggtctctcatctgtggatactatcacccgttctggtggaggtggcagtgaggtgaagtggactccatgagggttctttgctttggtggcttaatgctctattttcatgctggctggccttctgatgggaggcagcactttccagagagcatcagctgtggcagtgtggagaggaaccggtggtgggcggggatctagaactcccaagattatataccctttgtctttagctaacagagtgggtaaggaaggaccatcaggtgggggcagggctatgcatgtctgagctcacactctccttgggtgggtcttactgcatctgctgtgagggatggggtgaggttcccaggtcagtgcagttgtgtacctaggagaattatggctgcctctgctgagtcatgcagtttgtcagggaagtgaaggcaagccagcagtcacaggccttactcagctcccacataaactgaagggccggtctcactcccactgtgccctgacagccctgagtctgtttccaggcggtgagcaaggtgggattgagaacttgccccaggatacccgtctcccagctgcaaaataaaagggcttggtttttcccctgcctgtggagtctgcacaccagatttgtgccttcccccaagttctggccagagggcttcttgccctgttcaagagcattttctctttgtcacagtttgctctgtccaagtgtggacagatcaagatttgtagccctgtgaccaaggcagaaagggcctggtaacactggtggccaaagcagagggcctggccagagctgtggatggtggcaaatgaaagttcctctagggagctctgagtggtcttaccatagaagtgtttggtgagggtgtgcatgtacagggagaaaaaaagattaatacttgggaagacatttatagcacaaatgtgtcagagaaaaataagggagtaaaggaagaggaaagaggtggcaaaaagatgttgagtcaagagaataaagcttgcctttctgtgcctggcttacttcacttcatataatgtcaagttccattcatgttgttgcaaatgacaggatctcattctttttatggctgaatagtactccattgtgtgtatgtaccatattttctttatccattcatctgttaatgaacacttaggttgttccccaatattggatattgtgaacagtgctgcaacaaacataggatctcaaaatcaaaacaattgaactcatagagatagagaatagaagaatgtttgccagaggctgggaagggtagtgtgggggttggggggaggtagaaatggttaatgggtactaaaaaaaaaaaaaagaatgaataagacctactagtcacaagaggttgactatagtcaacaatgatttaattgtacatttaaaaataactaaaagagtataattggattgtttgtaacacaaaggataaatgcttgagggaatgaatattcgattctccatgattattacatgattgcatgattactacacatttcttgcctgtatcaaagtatctcatgtaccttataaatatatacacctactatgtacccacacaaatagatagatagatagatagatagatagatgatagatagataaaagaacagaagagcttgcaaattgcaaagaaaaagaagaaagacttttaagtagaagggtgtggtgaaggaagatgagaacagagaaatcgccttgagatttatttagagtgaggtcgctgatgaccttggaaaggacagtgttagtggagtgttgggggatggaagccagagagcacagtgtgagaagggagttctgaaaaagtgggaaagtcagagcagtacatttgggttgaaagatctttaaatcttctgatggcctatgaacgatgccaaaggcaaaaattcttgcctgccatgaaactgttggacgacgtgttcttttttcagattgctgttctcagaaagcccagggcaatcagatctcagccagatgtgttgagggtcaggactgagatcaacatcttgggaggtgaggttgagggaacaggggtgttgtgtgctaacactcttggcagtgtgagtgggcaggagtccatcctcagggatggtccttcttggcctgccccactgttattgttaacttctcatttccaggagtactcaatctataacaaagtattaaaactggtgttggaatatgatctaattaattcatttttgctttatctgaatataatgttagaagaaatcttggctttgaacttttacctcttgggctgtgtgatggtaccaggacagcacactgaaatttagaagggctgagcctacactggacacaaaggcctggtggggaaggtaggcatcagtgcgaattaggtttactagcaggacttgggccatagatgcagtcaatgcagatttgggttatagctgggacaggtaggaatcaactattctggccagggatgctgtggatgaaaaagctacctggaaattttcattaataacaacacagggagcatgttgctcagacactgggtaagagctaagtggtatctttaatctgtaagcagcctaggttttcatggctaattctgtcctaggtgcagagggcactctctctcctccacccagaattaatgactgtatttgttcttttggtaaagttagcgtatcttggggttctcaagtactttgccagataagtagggctcatcttcccagagtccccagttttctgttcattgaaatcttccttctctggagaaccatatgacatttgaaaaagtcatgaaaggtaaacagagagatctccatcttgggttttgataatatcctgatcttagttctggtagagtagcagtgagggaattcttacaaatgtcagtcatatgaaagattccaggcctgatttttgaaccctgtgccttctagtatatcttaaatatttcttccatagtctggtatcttgaataagatagacattatgcttttcgactttgctgatgtgatccaggtctcatgcttgagtataatactaaatcgagctcagaataataattaaatgttgagtatacacatgacttataattttaagttacaggaatcaaggggttgacccatcttttcttggaagagtaagggaggcagccattctcaaatggtttctttctgttttgtaaataccctttttcccttgaaagaaaatttatctgttggtccggactgcacagctagtgctgggaatcataagtagacaaaggaagaatctttcaaatgtggaaataaaatgatggccccaaactggttatctcagatttcttagatattaaagataaccagaaaaaataggagtttgtgcattaggggaaagcctgtaaacttgagtggttttcccataacacaaatgataataaactatatttatttagtacttactatgtgtctcatactaaggacattaagtgccattgtttcctacaacattatcatcctattttccagacaaatcaaatggagctagaaacctaacagatatcataacgctaagaagtagagagcaggagttaaacttagatctttctgttctcagctcttctgttctttccaatgtaaagcacatctggaaaggagatttactttgtgtggaaaagaaaacttcttaaaatggaaatagggtaaaacctaggagtggctattggtaaagttttattagaggtaaagggaacttcaaaggcaatgtgattctatcttctaactttttaattgaggaagctgtgacccagagatggtgacttgcttgtggtcctgaagaaggtctactgtctccagcattgtgaaaggatgactcttgtctgccagttgctggccagcctaggcaaaatcttctccagcaacttcagatccccagctgggctgtccctgagactccccaaccttcatatggtgtttcaaatttcaagccacctgaaatgacaaagaaacaagaatttgaggcacacctgggcagtaagataagaacgggcaactagatgtcctgtgtgtctatgcaattctggccaagtgtgcatactctcaggaagaacctatagttgagatcagaacaacagttggcaaatgggaactctccttaaggtaaaagggttcctgatttaaagattttgtctatccctttgcaaagtcagagaggccccctataatgagaaaacattgctccaagaaggtatggctgcaacttgtagaaagtatccagggtcacatatagactgtaagtacctaattatcctctagacctgtgcagcccaagataagtgtcatcaattaaaattaaatggatatcaattagaattaaatctaattaaaattcaattgtgttgcaatagtcacctttcaagtgttcaacaaccacatgtagctagtggctatcattttagataggacagaagtagaatattatgatcatcacagaaaattttattaacagtgattctctagtctgtgcaaatgttcatgactagaagtgagactttattcaagaagagtcttctttgagaaaagcttcatagaggaggtggcaactgagatgacttgcaaaacaattcaaaattagtcatgtaaatgttggggtgaattatggcaagagtcagaaactgggaaaagcatcctagaccaggacattgaaattgccttgtagagttttagtaattttgcaactctgaagggtaagatgcatgaagaaccatgataggaaatatgactaaatagatgacctggtgatttactaaagaaccttgcatattgttataaggagtttgaattttcatcctaagcatgaaggggaattattcaaggattctctgtagagatagcttggaaatggcttggccaaattttgcaaaaattactgttgaaaatgagtgagaattagaatgaaaggggatattttgggagaaaataaagaaaatagtaggctgaaaagctattgcatttacccccatgtttattgcagcactgttcacaatagcaaagatatagaatcaacaaaggtgttcatcaaagatgattgcacaaagaaaatgtgatatatattatatatatagccaatatatactattcacagccaatagaatactatttggccataaaaaagaatgaaatcttatcatttacagcaacacagatggaactggacattattactttgagtaaaataagccagatgtaggaaggcaaatattgcatattctcactcatatgtgggagcttaaaaaattgatctcatggaggtagagagtataataatagttattcctgcagggatctccataagcaatttcttaggcttattaccatgggtaaccaatttaggaacatttataccaaacactcacatcttcattgacacagaaggaagacttgtagagagtctgaaagaatatattttctcaagccatgtatctgaccaatatgaagcttcagccgcttggctattccaaaattaagtgataaagagatgagtaacctgttctgcaattatacaggcagtaggaaaaatagaaaataaaacaagacataagtaacctgatttttgtcatcaagatgttaaccaagaactgtcaaaacatgcttgtgtaacattataataattagaaataacaaaaacatgataattgcctgaatatctgatatatttgctattgtgttagttctcattctgctagtaaaggtatacctgagactgggtaatttataaaagaaagaggtttaattgactcacaattcagcatggctgaggaggcctcaggaaacttacaatcattgtggagggggaagcaaacacgtccttcttcacagggcagcaggaaggagaatgagtgctcaggaaagggggaggctccttataaaactatcagatcttgtgagaactaactcactatcatgagaacagggtgggggaaaccacccccaagattcagttatctccatctggttcctcccaagacacatgggaattatgggaactgccattctagatgaggtttgggtgatgacacagccaaaccatatcagttattattattttttcactatgtatgggagaccagacactgtgctaaactctaaagtgctttatacatttattttctaagtattattagctctataaaaaatggagaaagctgagaaagaaagggcaaaatcatacttaatttatccatgtattcagtaaaggaaaaacccaggctctgaataccagctgcctcaccccaaagcacttgtgtgtgacttctacattcttcataatttcatgtactcctcatgagaatcctgaagataagtatcattagaaccactttgcaactcatgaaccaaagctctgataagttaaataaattgtccagtatcacacagctcataaatagccaaactgactttccaatttaggtcattgattcaaggtcctttctctttccactgttttcctggcttctagtgtttcatcctcatgaactgtcatagactttattgatagtgaggaaaattagagaaatccaaggctggtcaggacccagaaggtgatcacatccttctccctggtacctggcaagacagaaactctacctgctcggtatcaagctgaagagggttctttgataaatagcgttgatattactacattataatagtcttacatgcttactgaagaaaagctggagaatagaaaaataacttcaaatatgcaaatttttatttattaatattcttcttaaaaaggaaatatatctttttgcttatagcccttctcatataaaatgacatttcccatatctttaagtatttttctacattatgattttaaaaacagctttgagtaccattgaatgataaaccataatgtattgaagcaatttggatttttgccaattatgttatcatccttggctaatggctatgattatttccttatgatcaactccaacaaattgaattccgagtcaggggcagtagaattttaatttttttgatatatagtgccacattgcctttcaaaaaacatgtgccagttggtgctcctaccaatagagtgtgaatgtattcattttctgtattcttgccaattcaattggcaaaaaatggcgtctctttgctgttttaaagattttggtttcaactgtggtagactgaatcatacttcccccacctttccccccgccaaaaaaactgcttatgtcctgatctctggaacttgtgaatatgttactttaacgaccagtgatgatgagcttttttcatatgtttgttggctgcataaatgtcttctgagaaatgtctgctcatatcctttgcccactttttgatggagttgcttgtttttttcttgtaagttatttaagttccttgtagattctggatattagcgctttgtcagatggatagattgcaaaaagtttccccattctgtatgttgcctgttcactctgatggtagtttcttctgctgtgcagaagctctttagtttaattagatctcctttgtcaattttggcttttgttgccattacttttggtgttttagtcatgaagtctttgctcatgcctatgtcctgaatggtattgcctaggttttcttctagggttttgatggttttaggtcttatgtttgagtctttaatccattttgagttattttttgtataaggtgtaaggaaggggtccagtttcagttttctgcataaggctagccagttttcccaacaccacttataaattagtgaattctttccctattgcttgtttttatcaggtttgtcaaagatcagatagttatagatgtgtggcgttatttcggaggcctctgttctgttccattggtctatatatctgttttagtatcagtaccatgcagttttggttactgtaggattataaatcattctactataaagacccatgcacacatacgtttattgcagcactattcacaatagcaaagacttggaaccaacccaaatgcccatgaataatagactggataaagaaaatgtggcacacatataccatggaatactatgcagccataaaaaagatgagttcatgtcctttgcaggaatgtggatgaatctggaaaccatcatcctcagcaaactaacacatgagcagaaaaccaagcactgcatgttctcactcataagtgggagttgaacaatgagaacacatgaacacagggaggggaacatcacacactagggcctgtcagggggtgggggactaggggagggatagcatgaggagaaatacctagtgtagatgacgggctgatgggtgcagcaaaccaccatggcacgtgtatacctatgtaacaaacctgcattttctgcacatgtatcccagagcttgaagtataataataataataataataataataataaagaatatgttactttatatagtaaaaaggaatttatagatgtgattgaattaaggattttgagatgggaaggttatcctggattaccctgttggggccagtgtaattctagagtccttataaggggaaaagaggagggcaagagttatagaaagaagatgtgaggatggaagcagaggtcagaggtgagagaagatactatgctgttgcaattggaggaaggggccatgaaccaataaatgtgggcatcctctagaagctggaaaaggccagccacagattcccaaagaacctccagaaggaacacatctttattagtccattttcatgcttctaataaaggcttacccaagattgggtaatttatacaggaaaaggctttaatggactcacagttccagatggctagagaggcctcacaaccattgtggaaggcaaggaagagcaagtcttttctctttgcagtaggcaaagagagagcttgtgcagggaaactcccccttgtaaaaccgtcaaatctcatgagacttattcactatcatgagaacagcatgggaaagacctgccccaatgattcagttacctcccgctgggtccctcccacaacacatgggaattatggaagctacaattcaagatgagatttggggagggaaaaggcaaaaccatatcaacactcttgcagacccattttagattctcacttccagaactctaagataatatatttatgctctttgaatccactgttttgtggtaacttgctccagccttctttcttcttttcatatttgctttccccttcacccttagcttatttttttctattgctgaactttttacctatggctttttaaaggctctttataaattaagaatattaaccattcttcagtcacatgttgccaatattttctccaattgtttgtcttataaattttttttcagtcttttgtgtgtagtcttttttttcccccataggatatagtaatgagaatcattataacctgtagtatcagaaagttctggacttgagtttcagctctaattttagacaagttgttttacctccctgagctttaactttcctatatggacatttggaaaatagtaatatcagccttataaagataattgtaatgattaaatgaaataatgcatgtacataattatcattgtatctcatatttagtaagtaatcaatacatattagatattcattttacattattttcttgtcatcttttattttctggtttcttccccttgaaattaattttttatctacataagagtacatgtttacaaggtacatgtggtattttgatgcaagcatacaatgtatcatgatccagtcagagtgattgggctatccatcacctcaaacatttatcatttctttgtgttgggaacactccaaaacttgtcctctagctatatggaaatacacaatacattattgataaatatagttgtcctactatgctattaaacaccagaacttattccttctatgtaattgcatgtactgattaaccaacctttcttcatccgtatctcccacatacccttgtcagcctctggtgatcaccattctactcattgtctccatgagatctacatttttagctcctacatatgagtgagaacgtgtagtatttgtctttctgaacctggcttatttcactcatgataatgtccttaatttccatccatgacactgcaaatgacaagatttcattctttcttattgctgactaatatggtttctttctctgctaaaggacctggggtaagaagctttccattttatcttggatccattcaatggttccaaatttcatgtatttagaagcttgcctttttcagtctaaatcaaattattcccagccctaattactgccattttcttgtctcagacattaaaggagaatagcaagtcacccttattttcattctgacccatgatgagcttgatggcttgtcattatagttagctgggaagcctggttgctgatggacgctttgctctttcactcttgaattggtggataaggaagaaagaggcgaaagtttgtctttccccatcattctctcaactgattctggagaagatcatttccattttgatctcagtaatggcaggtgatgaaactgccaataagttccaggtttatctaacagctgggtcaaaggtaacatgtgtataaatgtgagctctcatccaagcttttttgcaaaataaaactgtctggaagtcaaacatctgttaaaagaacgcagaattctaggcaaaatatatccagaagcaacttgtataacctgctagtgctagtgctttttgttctcatgattttttcaaatgtgtttgctttttgaagtggtgggggtgggtagacaaaagtagaaatgtctttttaaaatactccaagtacgttgggttttcttctcttggattttggatcaacattgatttggcagaatttggaagcagatttctttttttcctaagagggaaagaaccctagtccaaagtgttttatttcctctatcagcagaattctgaggtcattatgacagaaaatgacaatttggttcagaagggagcagatgattttttcttgttgttcaaagttctaactatctgattacttgctctgtgattgcagggatgcttctattctctgtcctagtgtcagaattctcacaaatgaaaaaaaccaaacaaacacaaagaggattataaatgggttcgcttatacctactgtccctttgatttgaagtgataataattattacttcatctcaaatcatctctttaggagcgtctattgaatgtctaatatcccaaaagttgtcagtataaaagagaaaataaagcagattactctttgacatcacagtacttggtatgctgtgtgtttagcaggcaagagcaaccctggccatctacatgctctggaagatattccagatgatattacatgcatctggaatatcttctctactcaattgcttagaatgtacttggtaaaccatcctactgaactagcatgttattccatttgaatgcttttcattagcccagaatcccaattgtccagcactccctcccttctcctgatccaatagagatactaagcttttccattatatgtcacctccttctccccaaggagtgctgccttctcacagggccacttctgatcttacacattctcaagtattcttcctttagaagctgcagtgccagaattctgattcctcgggtgtcagaactgttctctgttttcccactcaggactggttcctctctttctgtgagtgacattgtctggtttctttcgccacttgaaccctattacactttcttctttattacatagccctcacctgattctttgctcgggcatgactccagatctttcaccactggtctcaatggatatttatctacttatatgaacatcagagtcagtagcatttctgttttatcgttatgctagaggcatgaactatggtagattttagttactctgcttgctgacctacctggtgttttgtggatgtacagagagatttgaatttaggtatacactgttatcatggagtatggtcttaattgattaaaataaaacaggatctctcctttgctaccattaaaccaggacacctcaccatacccattttacaaatcttacaaagatccttatatagattgcatgcaaatgttttagtcctgcaacctggtttatagatctgaggtgcattgcccacatatccagttataaggagaaaaacaaatcagcattaatatggaggttctcctctcccctagccctacaaaagttcttgaataacttatggctctataaaaagcttcttgaaagttttgatggtgctaagactctataaccaataacatcctgagacccaggcaaaaggtttcttctgagctttgaactttagagggtcctacataacacacacacacacacacacacacacacacacacacacacacacacaaaatttattaaagaacacacaggattctttgtcatttgggtccagcacttggtgctggcatagtgtgaccaataatcctaaacatctactcttttaaccaacactgtccaaatcccagagaaaagctcctctatattccttgctgtgtgtccacaaaacaaaagaagttgtgtccaaaggccatgcaggtttgtggattgcaaccctgttgacatcagagatggacactgcttcagagtgcagggagaatttgagcagtagaagggcttgatttagaggaaagacaaatcaactaatttgtccaataatatgatgcattatgtaataggaatactagattataacatgataaaatatcatttctcaacagtgccaactattcattttcttgcttctcttaatgttttaatttgcgattccagagaaactcttaaattagtgcaagatttgcaaggattagctcaaaaattatcttattatattaaacaatccatattattcttaaatttgcatatatgtaaatagcatgcatgatgtgtgatactggtgtttataatgctgactagataggtcccaaatactagaattgcaaataatttcatttttacaaaaatatttttaatttgtaattttatttgtatagcttactctataattttgaattcttaaagaaaaatgacttttaaaaaatatattcaatttattttttatatcttacatataattttagttttagatgaaaatacactcaaacttgaatactttgaatacaattacattttatgttttactccattagtccatgctcaatcttcttagatatttggtcaattcttagtcttatgacaaaccataacttaatgcgtttcttattttgtgattacaaaggtctatttgtcaaagttggggaatagaatatttaaatcaagcatcatttttactattgctcgagccctgaaaatactaagggcggatttgcctacaatctttctcggtaacttgttctagtggttgtcattctgttatttgaaatatttttcttgtatcaaacagaagttttccctactttatcttaagccatttcttcttacatttacaattatacacacacacacacatttgcatacatatggtgaacattatcagatgtgttttataaaacatgtcttaataacaattttccctgaaaatgagtatttagaattgtgtttttgttctcacatttttatgattgatttttcaggtcttatctccctaccgtatatagaggtatttccctacttctgaaaggtaaatgagaactccatgatagttattattaatagaatagcattaaaaatacacatctgaaaaggaaacatcatggaaatgctttggaaatacactttttttcaggttaagtcttcatttttctgcagttagtctaaacttaaattttgtttggcttgtgtattactaagtgactgtgtggaaaacaactgagcttagctggcttggaagtttgggttctgtcttctaaggattctgtcatgctggctggaggcttagttgctcatctataaaatatagagcttctgcttccaacctactacctatttcatagacatgcagtaatgttttaatgaaaagtactttgagctctttgggggaaagaaaaagatgctctctgtaaacaaagaattggtaccaaaatattcttttcattaggtctttggatctcctaatgaaagtccaggctacctaatggatggggatttatagatggccagcatatccaagcacactcaaacattaaacaaacacagatgtgcaaatgagattatgaaattgcccaacaatggtacagcttgtacctggaaattgatggaagagactgatttttcataactctaattattctcactctcaaccatacattggagacgtaaactgtctgagcttgccattactgaaatggcaatccttttataaaactcttaacagtcctccacgggcaaagaaaaattaggaacagattgtctaaaactgggtctacgttggtctttggactttttttagagaatttaaaatctcatctagattgtcacaggtaccaagtagtaatcctgaaggacacacagctagtgacttgtaagccaaatttattaattttgcaatttcccatagatttcaggaattgctatagaaacagaggctttgggggcatctgagagctgcctagggctttgttttagtatataatatgcagacactccctgaagggtaaccccacaatacagaccagagggcattgataaaggtcctgacttctaggcttttattatttcctccctcattaagtctatgagtgacacaaatgaaaggagactttaatgatgacagtgacacattttgatttggattaccctggtggccttttctctcaaattcactaaattcttgctcaactctcgtcttgactctcactcatactggccatcttctgttactatttggcaaaagctttctgccctaaacgttcctgtcttgcacaatggaaatggtactcataaggtctcaatcaaaatgtcatgtgaattattttacttttcatgaggaagataaaaataaactagattgggattggaaaatccatttcatatcatcgacctcaagcagtcttcatctgtagtcattccagagtggtttcatctactttctaacctatcgttgcatcttcctcatggtgactcaggctacccttctattgcccaattcttgttacgacttgggaggttattgtggttggtttgtttttaatatcttgcccaatctttccattttttagttccagactgttgcgtttaatcactttcaactatcccattctttatagaaagacacagtactgtatgtgacctagctcaagtatttttcgatttcattctagggtgggtgcctcatacccatggactctacagaaattgcaagtgggagattgttatacaatttctttttatcctcatagtgaccaagttttgggtaattcacaattatcactgcattgattcctcataattgtcctgttctgttggacattaaattcccatttggtagatgaggaagctaaaaacaagacagtttagtcaactaactaacccaaggtcatctaatttgtaattgacagtgctagtaacttgaatccaagtttgactaactccaaaacccatttctgtgtatcatatacctgcctccccattaatctgccttaattcagtcttacacatattttcctttgtccatttctcaaaaagtcacactatcaatatcaactcctattttacgttctaaacacaacttttaaattttcatcagaattcttcctattattaaatttcattttgcttaagagaagtaagcacctgggctgtacatacaccacctctgtctgatccttctccaggggttaagcatgcatttggaagcctacatagccacgtgttgtactgcctttccttagatacagtgcaacaaaaatatcaatcaaaaatgccatgcccacagaaaccttaggacctttattaaaataaacaagcatactttattctaagttccaagaaaaaggttttaatcttttagttcaaataaataatgtttttcaatagagtcagagactgtttcccatggagctctgttagtacatgaagcctttttagaatgttacatagttatcatttcttcccactttcatggtttcttatcaaatatacatcttacgtatttgacttagttgtgagaagttgctcatttgatcaaagctaccctgcttattgcaaatgtggattgggaggagctctataaactgttacctcttgttcaaactgtactacatttttttggtaacctaccacctatatgtgggtagtaacagaaacacagcgaatgatcgtaactttttccaagtgaaatttcaccatcagtttcaatcatgcaaagtgactgaacatgagataatggttttcatggtcttagaattgttttccacaacatattttactttaataaaagtcaggatatcattttgaatatttcattcatccatatgagcctggctttcatccaggtagcatcacacatcatttacttatttaattttcagtaagctggtaccataatggtccaacaacaacaaaaacattgacaaagttaccaagatcttgaaaataatgcttctatcactacctccagatttctcttttttcccttaattcttaaccgttacttccttaaataagttttcctattcagtgagcagctgcataaatcattagaaaatggccagaaatacagaaatgccaaaaagccctctttttttttttttggtctttattttaatacaatgaacacaggtgcatccagtgtggtattttttatagcagtggttctgagctcaaattaaacttctgtcaaaccattgagcatcatagagctttaaaaccaagtggatgaaactaggtcttcagcctctctgagttgattaactgctttctactacacgggggttttctaatattcctgattttatattaccattttgtgtcagacttagacttctaatggaaactttcaattccaaacagagaaaataatagcaacaataataatttatcttttggctttcaatgtcttttcacattcttctcacttgaactttaaaaaaatccagctaggcaaaagggcaaatcttactctctccattttacagagtaagaaatggaaccagaggaatacaaccacccgttaaccaaagctactattagtcttgctctcatttgtcctcactctgtgtttcctggatccaaagcttgatttgttcattttcttatatagagagccagacttgtagtaagttacccacctgaactcagcagtgtggggggaggagggagaactgtgagcccttattaaaagttaaattatataaatagatgatattaaagacaaaggtaaagaatactcaaaactagtcactgaggttactgatgcctaatgtattcatgtggcagaaatgctatatggtggggcactgccatgcagtcagttgacctcacgttggtagcttgacattggctatgatgggaatcttcacaccataaaagttgggaaacattttaaatcaggtaatgttaagtgtttaccaacacaacactaggcaggaccatgtataccaaagaatagtcaaagaaagagcaaagcctttctaagcactaatttagtttggctgagatggtgaattggattgaggtgtaaacagggctagagagactcttcacagacttagagggctctagaaattagaaaacccttggagaatacctgactcaacaaccagatttgaccaatgagaaaactgaggccctagtggtaatctccccaaaactaaaccacaaacgcatggcagctagggcttgaatgacacagaagattttcttctctttcacacattgcacatgaaatgtctgagtaatcaaagttactgtcagtctcactctctttttttctctatgcttcctagttccaaagctgggcttactaattttctcatatataggaccagtctcactgtacatccctaatattgatattgacctaagaagtatttaaataaatgccagtcccaatcccatccaccccaacataacctgtgaggcttcctaaagttttctattttgaatgacccagaatttcccccatgttatacttctctctgctgcagttcttctatactttgaattgggctcctatgcctgatgcctcaccaggattccttacatgttgatgtccttctactacatcttgcaactctggcacagatcacttgactaaaatgagactgggaattacaattattttagattgagtcattttcccaccatgttgctctcatcctgtcctcctgcttctctatctaacacctcccttcctttcccttttctctcaaatctgaccaggtacagaactccttttttctcgtcttctgggctactacatagccatgcttcactataacataccaaatgtgttccttacacgtcgatcttggcagtaggatatacaatcagaattctcattattcttgacccaaggagagagaattgttgataaaattggcaacaacaaggacaaacatgatttatttatatattgatttaagaaatatgggaagcctagccataaaaggcagtattttatgtacttggcaaaaatatgaaaaatataataattgagggcaaaggtgttgctctaagaattattcttagaggtgaaattcagaatagttatttatggacctggagaccaaataataaaggggaaaggaattaggaattttagaaaaatattgttttaggcaagaagaaagacacacagaggaggttagctggggtagcagtgtgcgaggggagcaacagaggatgcgtatgagcagagaatgaggaagggctatgaggaactttgaaagggtggaaacttggacttttgaaggtaggaatagattggtggagagatgtggctacaacagaagtttggaatgaacattggcaaagaatctcctcatggcgtgttgggaaagatggatgaaagagtaagtgaggtgaaaggaagggaaattgagtcatagtcccccagtccaaatatgcactgctgaagggaattgagccaacagcaaagcttaaaaagaactcatgactggatatcctcaatgagagtgaaacctctttcttccagttcctgcttgaaaatataaacaacatgcaaattcaaacaaaaaaattcttcctctgtcacgttgagaaaccctctgtttactttgttgttgtgactcactttgagagtattcttacaagaatgcaatttgtagggatgggcagacctgtagggggaaaaacaagaacctctctggaatgtttacccattcttgggaccatagattttttttttttctacaaaggtctctattcctttttaaaagactcagtttagttttggagaggaaaaatatctcagatataacagcataactggggtgaggtacacaagacttctaagaatcattttttaaagaagcaatagaagatgcccaatgatgtaaaacaaaaatcacttttcttaattcaagttttacccaagtggataccaagagacaggaaaacttacaggaatggaatgatggatggtcatacttggacgtgctagcccaggaatgaagaagacttagacatgttatagttaattgtagctaaatggaagaaaaggagacagggaaagcaagaggtaaatacaggtcaaatcaaatcaaagaatcaaagccctgtgcttcagatgaagtattttaatgatacaaattgtctgtgtcaggggcttaaatgtgtacatttaggggtactgtctcaaaaaaaatgagctttcttccacaaaactaaaatccacatggacaattttgaatcggatggatgagaaagcaaagtaagttctccgtaaatacacagatgctgttaaaggattggtgcctttttttcttgtcttttttccttttttggagggtggaggtggggctagataatcttggctttagaacatttaatcctgacatactttataaggagctgcattcagcaaagtcttttgacattcttaatttgcctatctttgatctctggagagatgaatctgaggttatggtggttctaaagaaaaaaacattaattcaatgacacatgtgtgagagaggaatgagctagaaattaggagagaatatgtagttggggggttcagtggcgtttcagcatttctggggagtactgtacagtgggggctctgtgtgaagcctttgagccaagtggttggagacaaggtagatggtattttaaagggcatcagaacaatactaattaatctgttttattttcaccttctgcttaggatttttttttttctgaaagcacttacacttaacaaagaaaaaccttatttgaggagcaaatacacaatctttcctaactctttttagaagccaaatgcaattcaaatacacctagtccttcctaaaatgctttatgtattttaacaagtaaaactaagaaaattgtatttgttagtgctttatgtgagtatggctgtgaagtgttttcatcaaatttgcacagcatttttctgtgacctaatttcacatacagttatgtggcgtacaaagaattaactttagagactccctgggaaatacatcaaagagacactgagtcatcttcttgaaaagtttaaagccaagattgacaagaggcctggttcagaacagacatggcatttatactgaggaccatggacagagaacatggtgggtcctcacatgggccccaaatcaagtctcaagaacgaagcctgaaatgttggaatttcggtgacagctgtttctcactgggcaactttatgatccagggtaacagcagagagggacttacttaaaaataaggatccttctgtgcctagcagagaaggccaactagtatccagagaaaacactgggaaaaactttgtggtattcagtgggttacaagattgccatctgcatatatgattttcctcttccatctgtaggtaagttatgtccctggaagaaagcagacctgtctcatgttattattagattgatttgtgttcacagttttattttcccaataagatagcaagaggcaatgctttctaattcttttataattcttcatggcacttaggatagggataggcatacagcagttgtaaaatacatatttttggttaataagtttaaattgaaaagttgggtaagtgaatcaaagattcagttaattcatggttctgaaggttagacccgtaaatctgtaaaagtctttcaaattgctttgatcatgcaatgaaagtgaattgcatttctttttcagcagagtttgttttgcaatctgaattttttggactttgctttgaaaaggttgaaatgaaaggcatggcagtgaatcagcaatttaagaaggttaacaattagtcataactttaatagatgagacaattacaccatctttatcttttaaaaataactacatttttaattagattttaatcataaaggtcagaggtagtgtaagtttagaaaatctgaaacaaagtgtgtgttggcaaaactacttaatctcagatgtgttaacttggccaaattaactgaaacagatggtgagaagcttttgttccttaagtcatcaattgctgattgcatgatcttcataatctttaatattttaagacgcagtctcagaactcaggtttgtaagtattgctttctatttgtttattccttaaaatattctataagatctctgttatttgctcttggctttaacaaagtgcaatatgaccatttaaaaaacttggtacctcatttttgactttgcttctgttaaacatatgactctcctgcttcttgatgcatattttagaccttcatgagccatcaattttgaaagtgctaatttcagatgaacaatattgacttcagctgacagttgttgctctggttacctattactgtgtaacaaatgactctaacactgtggtacaaaacaacgatcatttttatcatattcatcactttgtgtgtcaggaattgcaggatacatctgggattgctgatctgtgctcgatactgattgggacctcaggtggcatatggctatggctttaatggctggagttggctgggatggctagactaggatattggtatgggatggtggttgccttccttacttcttctctataacacatctgctgtgctgaaatgtccacaatagctttttaactcatgtgtctggaacttgaattgcaatggctggaaaaggtaaagctggccaggcattcttctctcctctcctcttctctactcccttccccctcccctcccccagtcgctcccctcccctgccctccctcttccttcccttccctcccccttccctcccttcccctccttcctctgtgctcccctcccccttcttccctcccctccctctcttcttccctccccttccccctctcctcctcctcctcctcccctccccgttcctttctgctctcctcccctccattcccttcccctccccctttcctcttccttcccccttcttccctcccctctcctcttacttcccccttctttcctcccctcccctcccttcctctctcccttccccctcttccctccccctcttctcttccatccccttcttcactcccctctcctctctcccctccccctcttctcttccctcccctctcctctctcccctcccctccccactcctctcccctccccttcttcccttccctttcccctctatcctcccctcccttctaccttctcccctcccctcccttctactctctcccctccactcccctccccatccttacgcctttcctccccctctcatctcccctctcccctttcctcccctcccctcccctctctcttcctctcccttctcccctccctgctcccctcctgcccctccacaatccccttccctctcctcctctgtctctctctctttgcatgtgactttttcacatgactagcttcctcacagcatggtggtttcagggaagtcagatttcttgcatggcagctggcttctcccagaagaagctttcccatagagggagcatgaaaaggcccaggtgaaactgcaagacttcttgtgacctggtcttggaagtcctgggatgtcacttctaccatattctattggtcaaacaagtcactaaggccagaccagattcaaggagatggaaggaatgagcttgacgggatgtggcacatatgtacagggaggaaaggaattaattgatggtgaccatttaggagacaatctaccaaattgcctttttgttttatgaactagatttctgtaacagaacccttgtcctcaccctcagggctctcttttttttttgagacaaggtctcactctgttgttcaggctgaagtgcagtggcaccacctcagctcactgcagccttgacctcctaagttcaaggaatccccctgcctcagcccctcaaataggtaagactataggcatgcaccaccatgcccagctaatttttgtacttttattacagacagggttttgccatgttgttcaggctcatctggaactcctgagctcaagtgatctgcccatactggcctgccaaagtgctaggattgcaggcgtgagccactgtgcctggccactttttttttttttttaatatttgatgttttaattttctgttgttccatgtgtgctattatttcaaagacaatcatcaaaggatcagtattttaacatcaattttaaattttctacttttattgcaaaatgctgtttcaatttgcctaactcagttttacatcaacaaacagaaagaaatgctcccaatttttcagtgatactaatcactaaacttcttcaattatacctttgttttcaaccatcaccttcagcaattatgttgtttatgctagggcattttaaaggttaggaaattcatttctactatatatgagagctttaatttttttttagttcagggttttcagctagagcagagagttgatctaattatctgattcatttgggctttaaacccattgaacagacatagacagatcttataatgtcacatagtcccagtttgctattaagaatctacgtgtctttgacagctatttctcttggcaatttgaattaagttgtgacactgagttggctccagggaaacatctgagtcaggcagaattggtctttgatgttttatatttccatttaaggacttcaaatttcccaagacatcctactttttagatttctagagtccttaatagcacctccccctcatcccaatacaggagtctgtagaaggtgcttgcactcactatgaccacagaggtatatgatcattcctgagactgatgatactgaataattgaagtgggtaccacttggggagttctgagaatatggtttgtttctctaacaagtgttagaaaacccaactcaaattagctttaaccaaaagaaacgattcgaactactacagtctacgactatgactacagtcatgcctcattttattgcacttttctctaaggcacttcacagataatatgtgattttacaaattgaaggtttgtggcaaccctgcatcgggcaagtctgtcagtgctattcttgcaacaacatatgctcacttcatgtccgtctgtcacatcttggtaatccttacaatattccaaacttattattatatttattatggtgatctgtcatcaataatatttgatgttattattgtaattcttttggggaaccacaaactgtgcccctctaagacaccaaacctaatcaataaatgttatatgtgttctgactgctctaatgactggctgttcccccattggtctccctctcctcaggcctcccaattccctgagacacaacaatattgaaattaggccaattaataaccctacaaatggcctctaaatgctgaagtgaaaggaagaattgcacacctgtcacttcaagttgaaagctaaaatgattacacttaatggggaaggcatgtcaaaagccaggcaaggccaaaagctaggcttcttgtgttaaacagttagctaagctgtgaatgcaaagggaaagttcttaaaattaaaaacactactctgcaaacacacaaatgataagaaagcaaaattgcctcattgccgataaagagaaagtttgggtggtctagataagagatgaaccagccatgacattctcttcagctgaagcctaatccatagcaaggccctaactctctttaattgtacgaaaattgagagaggtgaggaagctgaagaaaagttggaagccagctgatattggttcatgaagtttaatcaaagaatcatcttcataagataaaagtgcaaagtgaagcagcaagtgctgatatagaaactccagcaagttgtctggaagatctagctaagaccattgatgaaggtggctacactaaacaacagattttcagtgtagacaaaacagccttctattggaagaagatgtcatctaggactttcatagctcgagaggagtggtcaatgcctggcttcatagattgagaggacaggctgactctcttgttagaagctaatgcagctggtgactttaagtcaaagtcaatgttcatttaccatttcagaaattctatagcccttaagaatgattctaaatctacccttcctgtgctttgtaaatgaaacaacaaagtctgaatggcagcatgtctatttacagcatgatttactgaatatttgaagcccactgttgagaaaaaaaaaaagtctttcaaaatttattgttcattgacaatgcacttagtcacccaagaactgtgctgaaaatttccaaggagattaatgttttcatgcctgctaacacaacatccattctgtagtccatggatcaaggagtaattttgactttcaaaatttgtttcttaagaaatacattttgtaaggctatagctaccatagatattgattcttctgttggttctggaaaaagtaaattgaaaaccttctggaaagacttcaccattttagatttcattaaaaacattcatttttttttttaccaaaaagtcattcaggagcaagactgaatatctacgtaactgtgtggttctgagagattttcttggtattgatttctatttttattgtactgtggtctgagagtatgcttagtatggttttgtttttttgaatttattgagagttgctttatgactgaacatgttgttgttcttagagtatgtttcatatgcatatgagaagaatgttcattctgtgtctgacgggttggagttaccctgtagatgtctattgggtccaattgatcaagtgtcgaatttaagtccagaatttcttcgttggtgttcagccttgatgaactgtctaatgctatcagtggggtggtggaatcccccactattattgtatggctgtttaggtcctttcataggactggaagtacttgttttatgaatctgggtgctcaaatgttgggggtgtatatatttagaatagttaagccttcttgttgaattgaaccttttattactatgtaatgcccttctttgtccttttttgctgttgttggtttaaagtctgttttatctaatataagaatagtgagcactgcttttttgtgtgttccatttatgtgatagatatttcttaaaccctttactttgagcctatgggtgttattacatgtgagatggatctcttgaaggcagtagatgaatggttcctattttttattcaacttgacactatgtgccttttaagtgctgtgtttagaccacttacattcaaggttaatattgaggtgtgataacaacaacttatcacaaagttgttagctagttgctttgtagtttccattgtgtgattgctttatagggtctgtggactatgtatttaagtgtgtttttttgatagtgggtattattcttttgtttccatatttagaactcccttaaggacctcttgaaaggcttgtctagtagtaatgaattcccttagggattgcttgtctgaggaagaatttatttctccttcatttatgaagcttagtttggtgggatatgaaagtcttggttggaatttcttttctttaagaatgctttaaatatgctctcaatctgtcctggcttgaaagatttctgctgaaagtcccctgttagcctgatagagttcctgctgtatatgatctgaccttgttctctaactgcctgtaagttttttttctttagcattgtctttgaacagtctggtgactatatgccttggtgatggttattttgtatagtatctcacaggtgttctctggatttattgtacctggatgtctgcccctctagcaaaattggagaaattttcttaaaattgttccctcaaatatattttccaggttgttttcttttttccacctctctcaggaatgccaataatttgtaggttttgatttacatgatcctatatttctgaaagactttattcatttttttgaattcttttttctttatttttgcctgactggcttagtttgaaagatgggtcttcaagctgtaaaacaatttcttctacttggtctagttcattgataaagctttcaattatgttttgaaatttcttaagtgagtttctcaattccagaggctctgattgatttcttcttaagatgtttatttcttccttcattttcaatggagaaattaaaaaattctttgaagtaaattaaaacagagacataacataccaaaatatctgggatgcagtgttaaaaggaaagtttatagcattaaatggctacctcaaaaagttagaaatatcacaaattaacaatctgaagtcacacctagaggaaataggaaaagaagagaaaactaaccacaaagctagcagaagaaaagaaatacctaaaatcagagtagaacggatgaaattaagactcaaaaatttatataaagaatcaacaaaaccccaaattggttatttgaaaggataaacaagatcaatcaactgctacctagattaacaaagaaaaaatgagagaagatccaaataaccacaattagaaatgacaaaagtgacattgcaaccagtccttcagaaatgcaaaaaaatccttagagactgttatgaacacctctgtgcacacaaactagaaagtctggaggaagtggataaattcctggaaacacacaagatcccaagattgaatcaagaagaaatggaagccctgaactgaccaatattaatttctgaaattgaaccagtaataaaaaaaaagctactactactaacaacaacaacaacaacaacaactctatcagatgtgcaaagaagagctggtaccaatactactaaaactactgcaaaaaatatcaaagagtagcgactccttcctaattcattatatgaggccagcatcacccttataccaaaacctggcaatgacacaatgaaaaaagaaaaccacaggccaatattcctgatgaacatagacacaaaaattctcaataaaatactagcacactaaatccagcagcacatgaaaatgttaattctccatgaccaggtaggcttcatttctggaagacaaagttggctcaacatacacaaatcaataaatgtgattcaccacattaacagaattaaaagcaaaaaccatatgatgatctccatagatacaggaaaagctttccatacagaaagtctacatactttaataatataaaccctcaagaaactagacatcaaaggaacatatctcaaaataatatgaaccatgtattacaaatccacagccaacattgtactgaatgggcaaaactggaagcttttcgcttgagaactggaaagagacaaggattactactctcacaattcctattcaacatagatctggaaatccttgccacaacaatgaggcatgagaaagaaataaaagggatccaaataggaaaagaaaaaaatcaaactatttttcttctctgacaatataattttatacctagaaaaccctaaagactctgtcaaaaggctgctgcaactgataaactactttggtaaagtttcagaatacaaaattgatgtataaaaaaatcagtagtatttctatacaccaataacattcaagctgagagccaaatcaagaacacagtcccatttacaaaagctaccaaaacaaaaagctaggaatgcatctcaccaaggagaggaaagatctctacaaggagaactacaaaacattggtaaaagaaatcatagatgactcaaaattggaaaagtattccaagaactggaagaattaatatgatttaaatgacgatactactcaaagcaatctacaaattcaatcctattcctatcatgttactaatgtcatttttttttcacagaattagaaaaagctattctaaaattcataagtagccaaaaaagagctcaaatagcccaatggatcctaagcaaaaagaacaaagccggaagcatcacattacccaacttcaaactattaatagaagggtagaaataaccaaaatagacatggtactggtacagaaacacaaacacatagaccaatgtaacagaatagagaacccagaaataaagctgcacactaacagccatataattttcaacaaaggcaacctcagcaatggtgaaaagactccctattcaataaatggtgctagaatagctgtctaggcatatgcagaagaaggaaactggactcctatctttcaccacatacaaaaattaactcaagatgaattaaagatttaaatgtaagatctcaaactctaagaatcttagaagaaaacctagaaaacaccattctgaaccttggccttgggaaataatttatgactgagtcctcaaaagcaactgccaaaaaaaaaaaaagaaaaagaaattgacacatgggacctaattaaactaaggaatttctgcacagcaaaagaaactatcaacagagtaagcaaacaacctacagaatgggagaaaatatttgcaaactatgcatccaaaaaaggtctgatattcaaaatctgtaaggaacttacacaattgaacaatcaaaaaacaaccccattaaaaagtaagcaaaggacatgagtggacacttctcaaaagagaagacttacaagcagccaataaacataagaaaaaatgctcaacattactaatcctcacagaaatgtaaatcaaaaccacaatgagatatcatctcataatcgtcagaatggccattattaaaaagtcaaaaaacaatagatgctggtgaggctgcagagaaatacgaacacttataccttgttggtgggaatgtaaattagttcagctaatgtggaaagccatttggcaatttccgaaatcacttaaaatagaattaccacttaacccagcagtcctatttaactgggcatagatccaaaagaaaataaattgttctaccaaaagaatacatgctcatacgttcattgtagcactattcacaatagtgaagatatggaatccacctagatgcccatcaacagtagattacataaagaaaatgtgtagattaatacacagccattaaaacaatgagatcatgtcatttgcagcaacatggatgcagcttaaggccattatcctaagcgaattaatgtgaaaacagaaaaccaaataccacatattctcacttatgagtgggagctaaacagtggacacttgtggacataaggatggcaactggggacacctagacggggagaagggagggaggcaagggttggaaaactgttttggactgtttgctcagtacctaagtgacaagatcaatagtaccctaaatctcagtattgtgtgatatatccatgtaacaaacctgcacatttacccttaaatctaaaataaaagttgaaattatataaaaaaagaacatttatgatttgtgggaggaggtcaaaatatcaatattgaccagagtttggaaaaagttgattccaaacctcatggatgactttcaagggttcaagaccagtgtacaaggtaactgcagatgaggtggaaatagcaagagaactagaattagatgtggagcctgaagatgtgactgaaatgctgcaatctcatgatgtaacttgaatggtgggagaattgcttttatggatgagcaaagaaagtgatttcctgagatggaaactgctgctgctgatgctgtgaacgtacttgaaatggcatatggaatatggaaaaggatattccataaacttagttgataaagcagtgtcaggatttgagaggtttgacttcaattttgaaagaaattctattgtgggtaaagtgctattaaatagcattgcatgctacagagacatctttcatgcaaagtagagtcaatcaatgcagcaaacttcaatgttgttttatttagaaaaattgccacagccatcatcaccctgatcaatcggtagccatcaacaaggcaagaccctccaccagcaaaaatattatgacttgctcaaggctcagatgatgatcagcattttttagcattatttttattaagatatgtacactgtgcttttacatacaatattattccacacttaatagactacagtatagtgtaaacataacttttatgtgcactgggaaaccaaaaatttgtgtgacgtgccttatcgcaatattcactttgttgcagtattctggaatcagacctacaatatctctgaggtctgcctgtaccttattgcatcacttgaattaggctcaaaggccggcatcagtttctctaggatgtctttattgtcacactttggtggtggcaactacccaacatgatattttgggaaattttgaagggagagttgacttcctcaaaagctcaagtagaatctccaaatggagcctggggctctggttggtctagcctggggtaggtgcttacatctgaatttgtggcctgggagatgaaatgcactgattgccttcacctggcgtcattctccactcttggagctgagaactggtattagctccaccacaaacatgaaggctgaaagtaagggagtgtactccccttaaagcaaatacagggtgctcctgccactggagtgagactcaatggtgggcagcagcaccaacaatgatcacaaaataaccacaatcatgtcttctcttcctctgccttgtctgtttcctcacactgccaactctgctccccctgcattccctcagcacctctgttttgatgagttgtcaagaagaaataaaggtctgtgatggcaggtggttttctcccaaaccttgatctctcaatctctcatatttttgtaaggattccatggaacactttgtgtgcctcaaacttaaaaaatgccatttccaaaaatagtccttttttttctcctgtgccatctgcatttctcttttgtatagccaaaaaccaaacattctcacacatgttcatttacacaaatagaactcctgagattattcccattattatacactaatttccatttatactccttagcccgaaaggtgagattaggagaagactatacgggaaggaagagaatagcaaaaatgatgcatgtggtagggaatggaaagctatcacttctgtgggttatggatgacatgcccctatttcatgggaattttacatggtcttgtctgttctgtaagtttgaagtccaaatgaattaggtaactgtatcaactccctacttcatctgttatttttatgaatgaaaatcgtaattgagggggcactaaacatatttttggagaaatgaaatggggtggtgtgctgccttaattagtttctctaaggagatttgatttcatatcagctcttatatttgaaatttgtacttttaattagaagtgaggacttacacataacatttcatctttttagtgttaaattcatcttttctgatatgtagcatggaacatccttatgtacacaggagtataatatcacaataatttcttattctggggagttatcacattttttcttatttgatcaaacacttggaaaaccaggaattaacataaaataaatccctgtacaaactaatcaccattattttcttgcattcttaatctgagatggtagaaaagaaacaactccccccctcaaaaaaaaaaaaagccaacaaacactataaatttcatggtaaaaaaccacgttgcagtgccccacgtgatatgtgattcaatgtcggtggcaatgttggtagctatctggaagaaaaggatgtttctgtcagaatctatgaggtgtgcacctttgctttctcttggccttctgccccagagcctctgtaatcatgtcattttttgctgtatggcaagcattgctctctgaaaatttggtgtaagttctgggaataggagaggtatacagacgtgtgattggtaaggagaaggtgggaagcaaaaggatattatcagttactaaacttctagatactgtgtaggcgcacttcctaaatcttctcatattattcatcataacaatgctaagaaatggttataattattatgatcattttacagttgaaaatctatggttcagataagttagaaaccttaaccaaggcaagacagtaacagacttgctatttgaagtgaggcttctaactctaaaacccatgtccttcatacacatctttttgattgcatggctaacaccgtgcttctaaaccctgcagctttttctttaaaaaaatttgcctggctttgactaaggctgacttagggttttctgttccttaaccgtgaacttctaacttcttttagcatacacacagctctggttctatgtcttaatggattcttcagagtgcacccttttctcctttgctttttcacattagaagaagtctagttatacctgttttgtcctctgcccgcaaattaatagccatcgtgtgactgcatatcagtgaaaatgctgtgcaggctcaatagttttaccttttacaggacaggttatgtctgcatctacaactacatctatctccttatcagtatctgtatctattcatacgtatcttcctacttcaaataccagcactaccatagttctatagttaatagaagcttgtttatatttgtcttttatatttgtttccttctttaaaatcttccccatcctgctcccaactctgccacggatgactcatatgaactctggaaacctcttgttccttgtataattcaaggattataatagtagtcttttttttttccttttctttgtttttttttcttttttttttttttttttttttttgagatggagtcttgctctgtcacccaggctggagtgcagtggcgcgatcttggctcattgcaacctccacctcccaggttcaagcaattctcccacctcagcctcctgagtagctgggattacaggcgcccaccaccatgcccagctaatttttgtatttttttagtagagacgggctttcaccatattggccaggctggtctcgaactcctgaccttgtgatcctccttcctcggcctcctgaagtgctgggattacaggtataagccaccgcgccaggcctactctttttcttcttattctactttgtttatttttgcttcaattttattttgaactaattttgacttggagaaaagttgcaaaaatagtaaaaagagagttctataccacttatcccacttccccttacgttaatatcttgcctaaccatagtataataatcataaacagaaaattaatgttgtttcagtaatattaactaaaccgaagattttattcaaatttcaccactttttcactaatggcctttctctgttttaaaattctgcttttacttttggaggccgaggcaggcagatagcttgaacccaggagtttgagaccagccaagacaacacagcgtgacactgtctctatgaaaagaaaaaagttagccaggtgtggtggtgtgtgtctgtagtcccagctactggggaggctgaggtggaaggattgcttaaacctggaaagtgagccgtgatcatgctgtgatcataccagccactgcattccagcctgtgtgtcagagcaagaccctgtctcaaaaaaaaaaaaaaaaaaaaattaaattaggccaggcactgtggctcacgcctgtaatcccagcactttgggaggccgaggcgagcagatcatgaggtcaggagttcaagaccaacctggccaacatagtgaaaccccgtctctactaaaaatacaaaaaaaaattagccagatgtggtggcaggtgcctgtagtcacagctacttgggaggctgaggcaggagaatcacttgaaccctggaggcagaggttgcagtgagccaagatcacgccattgcactccagcctgggcaatacagcgagactctgtctcaacaacaacaacaacaacaacaacaacaacaaaattaaattaaaattaaaaagattatggtttatttttgtcatgtcacattaccatcagaaattgtattgttgtttacttttatttgttaattttccattttctcaccagcatataatctctgtaaaggtaacaaatttatttcttgtcactaggccctcaatgttcaggaaattgtctagcatagagaaggtgctaaatatttgttgaagaaaggaatggataaatgctcctagaaggcagggctgatatggcctgcatgttgtttattcatgaattttgaaaagaagcacatgcccatggaagagttaaaaagggaatgatgctgggaaggataattttttccttttgttagctgattacttctctactattatgggatgctttcgtgtccatcaaatatttagcaaaaggtgatgaaaggtgggaatgttctagcagattctgggtgcctggaatctaccaatcaatggtagaatgaaatgcgaacggtaactcaaattgcaacttaaagcatctgcttaaaaagccccacaaaaacttgaagagattgccaatgcaatggaagaaaaatggcttctgggaataaaatgttgtaatctgtctttagctactcctatgatcaagtgtaaaatttggatatctgcatgtaaacatgtgttgattcacaattagaaaaagagattcaacattttaaactaacctgataacaatttttctataaaacaccacttagacaatttttgctttgtctgaataatgcgtactagctattgtaagttatcaatcttggaattttcaccccctccaacaagctcctcaaaactatgatctcttataatgttgccaagccttttcagatgattctctggcttaaatttgatatttgcttattatggagtagaaaaagtcatctgaaatttgatcatgacttctgggaaatggagtctttttcttttcatcttattttctgtaagttaaagaaaatggaaaactttctatgtgtaagtgataccattaaatgtgatttacattcagaaagacagctcttgatggtataaactgcgttggcctttgtacagaaagacacagaggaacaaaacaatgagcgcctctccataaataagatatatcagagttataatggataagtttacttttcttcactaggaaaacatgaatcactttataaatctcttttttaaatcatatcaaatttaaggtttctttctcttgggttagaagaagaattttagctatttcctatgcgaaaaaggaattatttgtttaactactcagttagtttgtccagtcaggcttttgttacgtaaagaaggttacccaaagttaaagtgtgaagcaacttgtactattgtttgtgttagtcacgattctccagagaaacagaaccaataggatctatgcatatctatgaggagatttcttttgagaattaactcatgtgactacagaggcctagaagtcccaccttctaccgtctgcaaattggagaaccaggagaaccagtggtgtaatccagcctgatttcgaaggcctgagaacgtggggagccaaggatgtaacttttagtgtgaggtcaaagccctgagaactggtgggaccattgctattaagttccagagtccagagacctgagaacctgaagccctgatttctgaagtcaagaaaaaacaacatcccagatgaagatgagagagagagagaatttgcccttcctctgtcttttgttctatttgagtcctcaacaattggatgctgctaatttgcatcgttagggggcagatcttctttacccagtctgctgattgaaatgccaatctcacaaacatccagaaataatgttgtattagctatgagtatttcttaacccagtcaagttgacaaaaatcagccatcacatggtttattccagtgtattgatagtaatggattgaattccagtgtgttgattctaatgtattgttccaatgtgttgattcacaataagaaaaagagattagttttaaaagaatgtgagaaaatgctttactaaacgtcacttaatttgataatttttgctttgcctgaagaatgcataaaagttattgtaagttattgaacccattgtttccaccccctccaacaagctcctcagccttgtctattcgcccatgcttctaagcagggtggatgtgatggatagggtgggtcaagagtcaatacaaattattgggttcagtggattggaggtggggattcaagcaaatcttttaaaatttttaggtaggttgtccttgctaggggttccccaaatgtttctgccaaaagaaaacccatatttgttgcccagttctgtggctctaaatggccccagcttttggaatcagccttggttttgtcctttgtcatgtcagcatctatttttgtctattcaactttcaaaatatctatccagattctgatgtcttctgcctctctcctcgccacttgctccaagcctgtgcttccaaatttgcccagtgagaagaatcacttgagaaacttattgaatacatgaattgctgagctccatctcaagcgtattgaatccaaattttttcaaatgttgcaagtcttgtattttttatttgtctattttttaaatggataatattttaaaggacaaattatagttgctcacatttatggagcaacaatacaatattttgataaatgtatacaatgtggaatgattaaatcaaagtttgtaaagggtccaaggtgacccttgtcaagcaagtatgagatttgcagaaatccactgtcatttttcctacctggcttgttgcaaaaatcttctaatcgatcttccagcttcagctctggtccattttctaaatggcaatcaaaggggtcctaataaaaagctaggtcatttctgtgtagaatgttactgagattgcattgaatccatagatcactgggtagtacatatattttaacaatgttaattcttccaggccaagaacacagattgtcttccatttatttatatcctcttcagtttctttcattaaggttttacagttttcattgcaggttatttttcacatctttggttaaatttatttctaggtatctttttttggtagccatcgtaaatggaattgctttctgtttctttttcagagagtttgctattgggatatagaaatgctactgatttttgcatgttgattttgtatcctccaactttactgaatttgtttattagttctaacagtttcatagtagcaattttagagttttctatctgtaagaaaatgtagtctgcaaacaggaataatttaacttattcctttccaacttagatgtcttttatttctttctctttctctgactagaccttccagtactatgttaataaaagtggtgaaagtgggcatccttgtcttattccagatcttagaaaaaagctttctatttttcccagtgaagtatgatgttcgctgtgggtttgtcacatatgacctttattatgctgaggtatattccttctattctgagtttgttgagagtttttttgttttgttatcatgaagggatgttgacatttatcaaatgctttttctatgtctattgaaatggttgtatgagttttgtccttgattctgttaatatgataaatcacatttattgatttgtgtgttgaaccatccttgcaaccatgggatgagtctcacttgccatagtgaatgatcttttactgtgctgtcgaatttgttttgctggtattttgtcaaggattttcgcacctatattcatcagagatattggcttgtagttttcttttctgtttttgagtgtgtgtgtgtgtgtgtgtgtgtgttcttgcttgatttttgaattctaaaatcacctatacccacaaaagaccctgaatgaccacagcaattttgagccaaaagaacaaagctggtggcatcacactacctgacttcaaaatatactacaaaggtacagaaatagaaacagcatggtaccgacataaaaacagatacatagaccaatggaacagaatagagaacacagaaataaatccatacactaatagccaactggtttttggcaaaggtgccaagaatgtacactggggaaataattagcctcctcaataaacagtgctggaaaaactagatatctatatgcagactgaagctatgtcttactacatacaaaaatcaactcaaaatggataaagccttcaatataaaacctgaactgataaaactagtagaagaaaacataggagaaatgtttcaagacattgggttgagtaaagatatttcagataagactttaaaagcacaaacaatgaaaacaaaaatagacaatggattccatcaaactaaaaagctttctgcacaacaaaaaatgatgacaataatcaacaaagtgaagagacaatgtacagaatggcagaaaatatttgcaaactatgcatctgacaaagggttgatatccagaatatggaaggaactcaactaactccataacagaaaaaagcaaataatcctgtttaaaattgggcaaaagtcctgaggagatatttttactaacaaccaacaggtatatgaaaaaaatactgaacatgaccaatcatcaggaaaatacaaattaaaaccacattgagatatcaccttatcccaattaaaatggctattaccaaaatgacaaagaataacaaatgctgggagagatgtggggaaaggggagcacttatacactaggggttggaacgaaaattaggaaagctgttatggaaaagagtatggaggttccttaaaaaaattagaaatagaactaccaaatgatccagcaatctcactactgagtatatatccaaaggaaataaaatcagtgtgtgaaagagataacttcactccaatgtttattccagcactattctcaatagttgaaatttggaatcaaactaagtgtccatcaatggatgaatggataaaaaaatgtggtatatatatgcagtggaatactattcaggctcttatttttattttgtattctttttataaatgtgtttgtttgcttgtcacaggatctcactctgtagcctaggctggagtgcagtgtattttgtagagttggggtttcaccatgttgctcaggctggtcttgaactcctgggctgaagtgatccaccctcctcagccccgtgaagtgctgggattattaggcgtgagccaccacactgggccagaaaatgcaagccgttagaaagaataaaatcctgttatttgtggcagcatgggtgaacctagaggacattatgtgaagtgaaatcagccaggcacaggaagacaaataccagctgatctcactatacatggacgcaaaagaaattgatctcatagaagtagagagtagaacagcggttaccagaggatggggaagggagagaggaggggctgatagggacagattagttaaggggtacaaagttacaattagaagaagttctgatgttccattgcacagtagggagactatggttaacaatattgtgtttcatatttcacaatagctagaagagggggttttgagtgttttcaccacaacgaaataataaatgtatggggtgatgaatatgctaaatactctcatttgatcattatgcaatgtatacatttattgaaacattacattgtaccaggtaagtatgtacaattattatgtgtcaattaaaaaaataaattaagaggctgggcacggtggctgacatctgtaatcccagcactttgggaggtcaaggctggatcacctgaggtcaggagtttgagacccagcctgagaaacaccacaaaatctcatctctacaaaaatatgaaaattagctgggtatggtggtgcactcccgtaatcccagctgctcgggaggcagaggcacaagaatcacttgaacccaggaggtgggggttgcaatgaaccaagatcacaccattgcacccaagcctgggcaataaagcaagactctgtctcaaaataaataaataaattaattaattaagaaaatgttagattagatcacttctctgcattatggtttcttatttcactaagaataaaaatcaaatgctccttagagtaacctccaaagccaactcccaatatctcaaacctattttcttgttattctctttcttgcatactctaatccaggtgtccccaaattcttccacaaattccacctcagggccttagaagtttctgcttcctctacttagaatgaaattctttagatatctgcctgacttgcacctgtacttccttccagattgggcttaactctcacctcatcggagatgcctctctaagtaacataggattgcttcacctggtctccatcctatgcataatttacttttcttcatagaatctaagtagctggcgaggccaggcgcggtggcttacgcctgtaatcccagcactttgggaggctgaggcgggtgaatcacctgaggtcgggagttcgagaccagcctgaccaacatggagaaaccccgtctctactaaaaatacaaaattagccgggcatagtggcaggtgcctgtaatcccagctactcagaaggctgaggcaggaaaatcacttgaacctgggaagtggaggttgcggtgagccaagatcatgccattgcactccagcctgggtgacaaaaacgacactctgtctaaaaaagaaaaatctaagtagctggcatattattctctttgatattgatattgttgttatcttctgtctcccctaatagaatgtaagctccataatggcaggaactatgtttttaattgtattgccagcatatagaatagttctttaattctagttagctctcggtaggtttttcaaattattaaatgacaaagacgatgaatgaatgaatgagagatgtgaaataggttcaagctcattggttcattaaatgtaagtaatttagagatcacagtagataggagagaagcaataggtgacagaaagtcatggcatatttctggttggattctctttttgtgatcaaacaaaacagagttgtcagagaaatactatatatgagaacttgcttacttcctgatatggttttgctgtgtccccacccaaatctcatcttgaattataacttccacaattcccacctgttgtgggaggaacctggtgggaggtgattgaattatgggggagggtatttcctgtgctgttttcgtgatagtgaatgagtctcacgagatctgatggttttaaaaacgagagtttccctgtacatgctcccactttgccagccaccatctatgtaagacttggcttgctcctccttgccttccaccatgattgtgaggcctctccagccatgtggaactgtaagtccattaaacctctttttcttcccagtctcgggtatgtctttactagcagtgtgaaaacggactaatacacttccccaaagaagaaacttccatgttggaaaagtttcagctgaggtttagagtttggaggtttcaaaatgtgaagttccgctggttctgagtatcctcccttaactggtcttaccggatgagaacactaagggcataatacatgtctatttagtctgctccactgaactacctctattcaactaacttgaaggacactgtgttagtttgctggagctgccataacaaataccacagactgagaagttttaacaacagacatttgttttctcacaattctggaggctagaagtctgagatcaaggtgtcagcctggttgatttttttcctgaggcctctctttcaggcttgtaaatagtcaacttcgtctgtcttcacagaagacatgatcctttctctgtatgtttatgtctttatctcctgtttccatgagtacacaagtcatcttggattagagtcacattctgaagtacaaagggttaggacttcaatatggaaatttagggagaacacaattaaaccaatacagacactttaccttgcaactgtgtaaagatgaaagagtcttcttgaaaagatttgaactcacattatgggaggaattgtacgcaaacttacatatggttacaactatatgtctatttagactcattcacatacacccatatataggtatatatagtaatacctaatatctgagaagaattagcacattttttgtaataaggtgccagtatcaaatttctttattatttacaaactcgcagacttactcgtctttcttttttccctatcctgtttctctgtttgtattttaatataatattattgttcacatcaaattagttagttgagatgcaaatgttaatttctgttaacagagttatgtgaatgttgttctaaaaatgatgacaggtacattgaattttaaaatctgaggtttaactacatagcatttctgcaatttacccttttttcaatgctagaaaacaaataaagctcttaatgaggactgtgtaaagatggtacaatggttctcagagtgtgttccgtggagccttgggcaaggaagaagaagcaaaaagtatatttttttccaagtccttgcaggaggtttgtgaggctgaaactatttttctaacactgagacaatattttctcttattctgttgacatttttactggtgttgcaaaagcaatggagagttaagctactgatgctgaaacctcaataccaataatatacaatttaaaaaggagggagggagggagggaggaagggaggaaggaaaaaagaaagcaatcggttttactaacaaatgtccttgataaagctgtaataattattgactttattacatctcaaagtttgattacctttgcccccaatagtctgtgtgatgaaatgggaaattcacattaagcacctctgctgcattccaaagcatgatgattgtctcaagaagaagtatgtgcatgatagtttgggctgtgagctggaatagacacttttttgttcacagaacacaatttttacttgaaagaacagctgagagataaactgtggatattcagatttgagtatttaagtgacattttcttgaaaaggatcaagtgagtctttcacttcaagggaaacaattaacaatatctgatgctaatgttaaaaattcagattttcaaccaaaattagaatttctaaaaaccatgcctgttactacaagtttgacactttcctggtatttaaagacttagctgatacaatcagagatattaatgattgtgaatatcattgttaatcgttgttactattaatcattgttaatatcattgttaatattaatcattgttaatatttgttaaacattattaatatccttgttaatatttgttaatcattgttaatatcacttctgatcttatcagctaagtctttaaatactgggaaagtgtcaagcttgaatttttgatattgaattataaaatatgttaatacttgaagaatctgtataactcaatgaatcaacattttctaaatgaccaatatatgatgttacaaacttgtggacaactaaaagatcgattcaaagtgcaggatagatcaacggattttaatataactgagagtgaaaggtcattaatattgttttagattccatattgcaactaacccttaggaaattatcacttgggttttgatgaggtatcaaagtaagtatcacaattatctgagaaagttaattttttcaactacatagctgtgtgtggatggattttctttatatacgtcaaccaaaacaatatatcatagcagttggaatgcccaagctggtatgagaatctggctttctctgttctgccagacattaaaggaattttcaaaattataaagcaatgccactcttctcactaaattatttttgaataatagttatttttcataaaatgttatttatattagcatgtaattggtttcttattgttattggaagatgagtaagtaaacaaatatattttgtaattctcagtgttaattttttaatgtagcagataccgaaaatcttaacccacgcaaacaaaatctctttgggactcctaatgatctttcaaggtataaaaaaccccttggcggcaaacactgagttggtcattttggcatccctctctcatccgtacctcagactttggtatcagtcttattgtctgtttgcagagtgcgctcagactgtctgtctactaaaaacaaatttaatggtttgctggtgtcctcgttcaactatcttagttaatcacttacgctatttttattatttctggttttatatttattacctcattggtccaacacatttatttaccattgttcaactatccactgtgcattatgctaagtgctgagaatataaataaaaaaggcaggtattgtcaataagatctttatttctgatgggggagatggatactaacctaacagtcaatgtatgtgtgatttgtgccactagaaatggcacaggatgctagggacccagaggaggggaatccacaccagatcatgggcgtaagagaaagctttccaaaagcagcagtgccagtgaagagtctttaagggcatttagcagttgctaatggctgctcattcatacatctgccctttgaggctggctgtcaactgagaacttagctgggtttgttgcctgggacagctttatgtggcctctccatgtgtggcctgggcttcttcacaacagggtggctgagtcctaacagtaagtatcctgagagagagagagagagtcaagcagaagctgtatctgtttatgacttcgccttaggtgttttgcatcattacttcaccaaattctgttctttgaagctgtcacaaaggctctttggctccaagggtagggaaaatacagctttactgctttctggtgggttggcaagattctggcctggaagaattgctgtggacattttctgaaaatacagtctgctctctggccacacaattcaaaccttttcactggtaagataaactcctatcctcttcaaggctccccttatctcattctgttatggcattatgctcaaattcatggtccaggatcccacaatccaaatcaggtccaagtgcattagatccaagtccatgaggctccttgcagttcactgactacaaatcctctaatacagtttttgtcaatgtgagagcctgtgaacaatgaagacaaattatctgctcaccacacactcaacatacaatgatggaatgtgggctaggcataggataactgctatagtcactccagttcaaaaaggaagaaactggaagacactttcatccctagtccatagtgattctgaaatccatctggacacagttatggctttctaggttagggtttagtcctctatcctagaaatgattctccatggctcttggctctgacctctgagtactctttccttttttttttttgtttgtttgagatggagttttgctcttattgcccaggctggagtgcaatggtgcggtcttggctcactgtagcctctgcctgccgggttcgagcgattctcctgcctcagcctcccgagtagctgggatttcaggcagccgccaccatgcccagctaattttctgtattaattttggtagagacggggtgttgccacgttggccaagctaatctctaactcctgacctcaagtgatctgccagcctcggcctcccaaagtgctgggaatacaggcgtgagccaccacacccggtcatctttccttttcaatgagcattgccctgtgtttgcaattgagtggtagtattttcagcctgtttcctgtcgatagaattcagaggcccaaaccctcttttaattttgtaatgtctctggcccttttagtccaaaatacgctgaggcaaaaagaaaagcacaaactggtgtgggtggaatgaagggtgaacggtagaagatgatgatatggaagaaagaggctgtggcaagttcatgtgccgaaccagagatcctgaaatgtatccaatgagtgcaatgcagaaatgtccatttctgctacttactctcttttgctaaactttcctaaaagtattcttactgctttaaaatatctgttgctgaagttgggagaaggatgtttattgtctacagtagttttgaaattcatcttagttgaattttgactgcaagatgctctcacatgtgtgctctcttagtattcccaaattgttttgtggtcacaaaagattttccagttaactgctttatgcccgttacatgcatatttcacttcagagattgatgcttaattttaaaaggaagccctctttagaaaaagacataaatagtattttcaaataagataatctctattttattatatgagtgcttttgaatactaattgtgaagtactgctggaagagaactgcaattctggaagcctagtacagcttcaactaataccctacatcttctgaaggagtacacgttttgttactaggctatttaataaaagaaataaggtaagtacgacttcaggttcctgaaaaatacatacagcattttttttgaacactcaattttcatagaggtatagctttcagccggcaaatatttatgaccatgttattgtgggtattttttaaaacaacttgattcaggaaaagtcagcttttcaaaacaccttttttgcctaaaatgtcttagactacagtttattcacattcataagatgtcattacctttaagagtcctgctgctaatagctatccaacgtttttagtcaaaatgtgagtaaaagagaaagctgaaaacttccaaatatttttattcctcaaattaatcgttccataaaagggctctaggatatgaataatgcattacaatgctgctgcagataacttcacatatggtacacaatgatgtgaatagagaagagataaaataggagatgaaagaactgcattagagacaaatgagtgaactgacacaagcattttcattccatttgatttgcacaatgtttttattgagtatttgctcatttgctgagctctgtaatggaaagataactgagtaggatttggtccttgccctttgggagctaatgaacatttgtgaggatgtggggtgggctttattattccatgtaattgatgcaataatcatgtataccatgaaatgacaacctaagagataattcctagtaaggactcaggaagtctgcagagaagatacagtatttgagcttgatggcaaataaggtgtccaatttgggaggtcatcctctaaaaatgaaacaggtaataagaaaaggcaggaggataggaaatatggggtgtcttctggaaatgctgaatagcttatctagtgaaaattggagaaatagtgaggagagtattagaggtagattggaactagatcctacaagatcttgaaagccaaagaaacaaacaaaaattatcagacggtgcagtggtgcacacctgtaatcccagcactttgggaagctaaggcaggcagatcacctgaggtcagaagttcgagaccagcctgaccagcatgaagaaaccccatctctactaaaaatacaaagttagccaggcatggtggcacatgcctgtaatcccagctactcgggaggctgaggcaggagaatctcttgaacccgggaggcggaggttgcggtgagcagagatgcaccattgcactccagcctgggcaacaagagtgaaactccatctcaaaaaaaaaaattatcttttttttctgtatgatctggggtgttactgaagattttggggaagctatgttgcatgactagattgagattttaagaatacacatgatgcctcagtgagtgatgatttggaattgacaacgtagagttaagttttctacaatcagagatatgtaacaattatttgaaaatacaactatagtcaaaatagaaaaaaataagtaaattctattcttgggcatgtctttctaaacaatctgaaagaaagaaaataaatacgtggccaagtgctgtggctcatgcctgtaatcccagcactttgggaggccaaggcggatcacttgaggtcaggagtttgactcagcctggccaacatggtgaaaccctgcctttactaaaaatataaaaattagctgggcttggtggcacatgcctgtcatcccagctacttgggaggctgagggaggagaattgcttgaacctgggaggcggaggttgcggtgagccgagatcgcgccactgaactccagcctgggagacagagcaagactctgtcgaaaaagaaaaagaaagaaaaaataaatatgaaaatatgattatatttaactatgtattcataggtattcataggaaatttctatataacaaaaaatttccttcaagcacacatataacaaaaaaaaaattaaagggccactgtccacaatatttaaggctaataagataaacagaggattcctacttttactatcagcataggaggcagcgtagtgtattgttaaaaggatggcttttgatgccaagcgagaccttggatctcttaagtgctctgtgcctcagttttcttatctataaaatggggatgatacgtgctcatggcactgttgtgagatttgaagtgagtaaatgtatgtaaagtcttacattattattgctgttttattaacaatgactgttgcatatattgggtgtctgtggataagtgatatggatatggatctgtgtcttcatgaaatcttatgtgaaactgtagtcctcaatgttggaaatgcggcctgaggggaagtggttggatcatgggggtggatttttcatgaatggtttcgcaccatccccccagtgccattctcatgatagtgagtgagttctcataagatctggttgtttaaaagcatgcagcacctcccgcctcattctctcttgctccttctccttccatgtaagacgtatctgctccccctttgccttccaccacgattgtaagtttcatgaggcctcctcagaagtggaacaggtgccagtgtcttgcttcctgtacagcctgcagaaacgtgtatcaattaaacttcttttctttgtaaattacccagtctcaagtatttctttatagcagtgcaagaattgactaatacaataagacaactagttatttagttcataagtctgtcaatcgagaagaaccatatctagaatcttgatattgtgcatcactgtacattaccttgtgatcttgtggaccacgattatttttgttttattggaaatactagtaagtaattaaggtcaagatgttcactgaaattgcaaagtggaaaataataagcctaatcaattcacatgaagaaaaatgcaagtggttattaaacatattataaaatactcaattttactattaatcacagaggtaaaaataaaaatagcattgagttaccatatcataaaaagtgatgcttatatttagctagaattgaagaggctaaaacttggtttagctttaagtcccaatcctggtggtgatgtaaatatacagcctgtccagaaagtaatttgaaaatgcctattgaaagtgttcagagccctaaaatctttataatattgaatattacataactgtaaaaacttatcaggacaaaactcatttaatattactaagagataagactcaacttgggaaacatagtatgtacaataagattcaattattgtaaagaataatattatgtgcccaggaaaaacacagaaagatttatagtggttattgtgggttgaaaggttgtgtttgtttctttccttttctctgcgtaactatctattggttcctcctattgagtattttacataagcaatgtaaactttttgaaggcttttgctatggtttagaccatgaaggtgagggctaaatagtcaatattttagactttatgtgtcacatagtccctgttacaactactcgactttgactttgtaatgtgaaagcagccacaaatagtccaatatctttgtttcaaagagaggcagtggactaaagtttggcctacaggccagagactgccaattcttggaattgacaagagataatggggacttgattgtgaaaatgacacttagaataaaaagctaagaatagataccagagacatcaccagggtggaatttacaggtcttgaggaaggtctgttgaccatgatggagttgaccatgacttttaagtttcaattttagatatcagcactgatggatattgagtgatgcatatcaaccaatatagagaactcaaaagagagcaatccaatttgtggagaacatgacagattcaatttgtgatgagctgaattttcaggaaggcatttgtcaacatgggcctgaagttcaggaatgaagtgagaaatgaagctggggattaagatgtatagtgcatcaatgatgacttgataatcaaagtcataggagctgatgagattttggaattgaaaaaaaaatcagtgatacacacagatggaaacctatattccatctctgattatgccctaaaacatgttggataatttggatccttcaccacagtctacctatcttcttccccctgctaagggagtgggaaagatagctttgaggacagagacagtgtccccaaaagttcatggccagcttcttcctgaactccatcagcagagaatgcaaaaggactctctaggaagttggaacgctaacttgttactccagcaaagcaaatagctacatccagatcagacataaaagttgcctagttttaggattttgtcctaggaagccaactgcaatggtcggagtgcttgtgttccccccaaattagtatgttaaaatcctaacccccaaggtgatggtattagaaagtgggaactttgggaggtgattaggtcatgagggtggagactttataaatgagattagtgcccttataaaatagaccccagagagcccttttatgcctttcaccatgtaaggacacagcaacaagtcactctctgtgagccagaatgtcacagccctcaccagccactaaatctaccagcctacagaactgtgggaaatcaatatctgttttttacaagccacgtagtttttggtattttgttataggagctgaaatggactaatacaccagccaacttctgaatgataggagcagacagagactattttaatttgaaaaaaattgctataatatatttttcccagttaaaaagttaattaaaggcagtggttttttgttttgttttgttttcttccataaaaaatatatagggtttaggtatcctattgagcctcaggaaattgaatagaaatggatattctatttggcagtacagaggttaaaaaaaagaaaagaaaaacctgcatggaatttaggcatcttttttttttttttttttttgtagctgccttttcaataacaattaagtgattaatatgatcattattattcagaggtgtagtcatataagcaaatattttgatgctgagcttaaatgtttccatagaaaaattatcctgatattttggcctctgtatgaaaaaaaaaaaaaaaaaaagaaggaaatgggaaagagatctagggcaaatttttaataatatggatttttccccctttcacatagtgtgaaagttacagtggttgccagcagcactaaaacagtcagaccactttcagaaattcagtcacctcttaaacacttagaggctgcattgagtgaaaacccgttttcagaagagtttccaaggaagtagaaagtttccacaccctacatcttgtactaaaagaaatggaaacaggggtctgtctgccaagaagtctgaattgttgtgtcacagactgttgaacattataatcagtaataaaaatgggaacatgcttgatgctacattaaaatacactttgaaaagcttagcctaataatatttttttgatttattttattattattgttttgcaatgcttacagtgtttccacatttcaaataacaataagaaaagcaagacaggaaaaataaactttaaatagagatctttagaagaagtatattgaaaaacttctttttttttctcaaaaattacttggaaaaatcctaggattgtcaatctgatgagccaaaggctagtagtagaaattttagtctttgtttttctaattgtgaacacaatagatgctcatataaaaattgaaatgattcaaaaaagtataggaacaaagtaaaaatcagtcccagatttctcaaagataatcactgttaatgtttccagacataattctggacatctgtccgtacatacattgtattaatgcatagttcaatataatgttgtgtagacataattttatataaatgggtgcacactttgggctttggttacatagcttttttcattcaacaatatctagttaacattttcccgagtcaataaatataaatctattcaattcttattcttttattcattattctgtgacataggtaatatacaagtcatggagttgatctgttggtcatttagattgtttctaattctttgctacttttgaatagtactatcatagacatccttgtatgtgtagttcaattatcttattaggataaatttcttgaggcagaattcgttctttcatttatttgttcattgaatcaataaacatttatacagaaagataggtattagcttaagcacaggggatttacaggggtagaaagaaaaaaccttctccttgtggagcttacatttttcgaagcaaggaacatcataaataagcaaacaaacaatcaacagattataagtgttatggcaacaataacataaggtgattattttaaaagtaattggtagctcactttagagggagtggacagaaaaacttcaataaggagggactatttgagctgagacccaaatgtgaaaatatgtactcatgtataaaaatggaaggcagagcactacaagtagagagaaaaacaagtgcaaagaccttgaaataggaaagatcttggcctgttcgagggacaggaagaaagccagtatgtctggcttcctgtatgtcaggacgtggggagagcggcaggggattaaggttgagatgcatgtcaaggccgggtcatgtgaagcactgtatgtattgtaaagtgttagggctaacatcctaccgcattgggaagccaacagagagttttatattgagatcgtgagtttaaacggattgtcccagctgctatgtgtgtttgggggaggtttggggtcaagagagaggacagggaaatgaatcagagtatatttcagtaatccgagggggagttggaccaaggagttttgtgaagtggggttatggattaggaatacttttcttaacctgtaatatgcttacatcatactaaacttgaagggcctcttagacacatgtatggatatgcatcaggcagctggatatctgaattcggaacttagggaaatgataaacacttagagaaatgagttatcagcagaagggtagtattaaaggcttggaactggagacaaaacttacaaagaaagtatagaaagagaaaagtagggggcttaggactagtccctggggcactcaaaggtttaaagactgagcagaagggggtggtggccatcagaggaggctaagcaggagtagtcagtgaggtaggaggaaaaccaggagcatgagtatcgcagaagcgagaagaggtggtgttttagtaactaagaccagcaaactgtgtaaattcctactgtggtctgagtaaaatgaatacagcaaagtgtctcctggatttggcaacacagacatcactggtgaccctaagaaaggcagtttaagtagagtggtggagatggagtcttggtcaaagagggttaaggagagattaggttacaaggaagtccacaatggccaattctttcagaaattttacttttatggggagaaaaaatgtggcagtgcataaagggcaagacactttgaaaaataaaatattctttttttttttttttaagagacaaaatctcgctctgctgcccagactggagtgcaatggcacaatctgagctcactgccacctctgcctcccatgttcaagtgattctcctgcctcagcctcccaggcagctgtgattacaggcacccaccaccacacctggataatttttgtatttttgtagagatgaggttttaccatgttggccaggctggtcttgaactcctgacctcgtaatccgcccactttggcctcctgaagggctagaattacaggtgtgagccactgctcctggccgaaaaataaaatattctaaacttgctgatactctgatggaagtgaccctgtagggagaaagaaattgataatgaaagagaggtcagttaaaaccaaggagcctcactggtgattaggtaaaaggagctggaacccagaagagaagcggaagggccgactgtaagatgtggttatgccagggagtatggcgggcagtgtccaccagacatgcataggccactagacttggtggtattctttaaggaagtcctcaaagtataactattttcccctacagcgtagttagaggcgagactggaggctaaaaccgtggtgagagaagaaggtggtggaaattgaggtgatacaaaaaagtataaacgaattgtttcagaagaacactagatgtggtaagatgcttagtgttaagtgcttatatgacccgtggttattaatttaaatggaggccaaatggcgtggctgtatgtatgtgtgtatacatttcctgccaggtatactacatgggcataagtatggaataaagaaataacagggttcacagagtttggggttttcctaggttattgtagcagaggaagatagaggcaaggggctgatggatttcgcaaagtagtgactgaagggacagaacatggaatctaagctggataaagagggaactgtggagatgagagagtgttatgtgtggaattgtgtcccactcaattctacattgaaatgcaaatcctcagtacctcagaatgtgactgtatttggagacacggcctttaaagaagcaagtccaggaggcagaagttgcggtgagctgagatcgtgccattgcacactccagcctgggcaacgagagcaaaactccatctcaaaaaaaaaaaaaaaaaaaaaaagcaagtctgttaaaatgaggccattagcgaaaagcctttatccaaaaagacacatttcctcacaagaagtataaactaagacacagccacaaatagagggaagaccatgtgaagacagaaggagaagatggctatctacaagcctaggagagaggcatcagaagaaaccaaccaaccctgttgacttcttgacctcaaagtcttagcctccagaattgtgagaaaaaaaaaaatttctgttgcataggccatcctgtctgtgatactgtcaggacagcactagcagacgaacacagaaaggtataataaaagtaacaaaaagattgttggatcaacaaagtatatgtttagctgaccacacacagaatggttggcatgagaaaacaagtacaagtaagtttgaagaatagggcatggaaatgagaaagtagggtgcttaaaagtaaaattatgaagaccatgaggttactgggaatgacaaaaccaaggttgggaccctgggagtgctgaagtaaggctgaagaaaagattattgaaggaaaggagtgaagattgaggggaaaaggtagttgatgaggcattcacgtggattcatgttgaagtcacacaggaacgacagaagtaggagtaaggaggaaaatagtgaatcaatgaatagaatatccaacaaatgggagacagagagagaaattgagagagagagagagagagatcatagatgatgataataaaggcaggggataggtatgttctggctgcattcaattcaaacaaggaaggaaagaaaaggaggaaggagagaaaagagtttagaagagacaactaggagggaagaaagcataatcccttcacctccagacactgaggtacttggggtttaaacaaaaatcaactttcagtgaaagaactgccaagctggcactgttctcagggagacctaaagtggacttaggagaaaaaaggtgaaagaacaaatcagaatagagattgaagatatagaggtgcttacccatgcttgggccacaagttccatacgtcaaagtaagagtttgggactatagggaagatgacatgatacaaggttagattagcagattaaggatatgtttccaggtgaagatggatgaggcttcatgctggagtcttagagattattgatgtcagtggtgtgctgtcttgagtagctgctgtcatcatgctggctgcagcagggaggcatggctggggctgcctgctccatggaaccagtgggagccagggacatgtgggagtcccaccccttccaagttggggcgagagttccccaggtgccactgcagccacccaagcctcagctgcggacccgggaacccctgtgctctctgggcccaggagcaggtgggagccccaccctcctgggcacagctgcagttgcccaacccatggctgcagacccaggcctcctgttgcatggagcaggcaggagctcaaccttcccaggcagggctgcagccactcaagtcatgggtgcagatccaggcctcctgctccaaagaacagcaggagccccacttttctgggcacagctgcagctgcccacgttgtggctgcggacccaggcctccttgtgcttttggggatgctaggagcaggcaggagtcctgcacccctcaggcccagctgcaactgctgaaaccatggctgtggactcaagcattgctgcactcttggggatctgagaaggctccccctacccttgcaggctcgaaagtagctgcttccactgctggcttctccctgctgttggtgtccgttccaatctcagagcaaattcagggccaagcccaggcactgtcacagcccagccaggtgtgcacatgctcagggcaatgctgacatgccagacctctgctgccttggccacctccggacttgggatgctgatgagcataggagagaagctgatgagggggctgaaggcagcttaatgctggcctacaggtgccccttggcacctacagcctgggagccatgaacagctgcaggagagaggcaggttcctgggtggaagggaacaggtccctggtgaggccccaccttcaggacagggagggcctgaaagctgggggccaggatgccagtcccacagactggagtgggaacttgtggtgctttttccaggcctgcccatggctgcccctggaccaattggcacacacttcctcccttctgaggctcataaaagccctgggctcagccaaagctgagcagacattgggacgactggctgctgagaggaggcacccactccagggacttctctctgctgtgagctgcagacatcaggatgaccagctacagagaggagcaacccactacagaacctcctctctgctgagagctacacagatggtgggatgaccagctggagagaggagctacactctctgctgggagtgaacacttgttgggacaacctgcctgcagagcagagctactctctctgctaggatctgaacactcaacaaggcaccctggctgtggaaaggagctgcccccttcaggagactgagctgttctattgcttaatgaagctcctctttgtctggctcacccttcactttgcataatgtattcttcctggtttcaggacaagaacttggggcctgctgaatggtgaggctaaaagggctgtaacacaaacagggctgaagcatgcccctttcttgtcacattgtgggtgaagagaaggagagaagagctgcagcctttcaggcagcccagacgtgggagctccctgagccagggctgtgactctctctctggggccctgcagttcctggcatctccaagctttcacgtgccactgcattccccggggccagccagggaagtggcttgctgtccacctggtccagccacagcctcgcagagagccagtgccatgacagcacctggagctgcctgccccatggtagctggcaggcaactggtgggtctgactgcacagtggccagaccccacacccactcacacacccattgctgctccacacctgacttgcgtctcttttgaagctatgggatttaggctggcaccgtgagctgtgcaccacccgccaggctgagtgggcagaatgagcccagcaggcccaagcaaaacttgggcaaaggcacgactggccacaggtttccagtcagaaaagtgacaccccaaagatctgtaacactagggtgatgagagatgtgaggcttttctttgtatggagttttagaggggggttatgaatattttaagctggaaagtgtagggagactgaatggcccactgttctcagagatgaagagagacttcctttgagatactggacttggaagacatttctcagtagtgtgctgctggagaggtattctcactagagcaccaggaagaatgaagtatacatacataaaaatggagatccacgtgattaataaacataaggtgcacattatcaataatagccaatttactacaaataaaatgagatatattttgtctaggagatggatacatgttagaaaataatttgttctactctgtgttggtgagggtgggagaaagatgcacgctccttcacagttgtgaccaaataagttagtacagccctttggcagggctagctcatgaatatgcaatcttattttgaacatgcatccctttagcccagaaatcccttcatgtgggtcagtgagagtacttcttctctagcagttgctactatgctatttcagttgttatctaccctgtgtatataatcctgtcactcttagtgttactactcacagagttctctgcatcttcttcagaatgaatcttatgtttgtagaccatgcactgggtttgggtcacaaaggtgtcatttttgaatctttatttttctacttactaactacatgctctattttcactgcaatgtgtctacatgctctattttcactacacactacagtgtgtttacatgctctattttcactacacactacagtgtgtctacatgctctattttcactacaatgtttttcgatggaagtcaggatcataattctcacctgacgcaactcagcactaaatgaaatggtgtgtgtgaaattgcctggtgtgatgggacacacagttatcagtcatgaatgtaaggtaatgaaagcaagccttcaagaaagcacgttttagttattgagactttccccgctgattctaatatgagatgtaatataaaaataaagtctcctacacagatttgttattttttctttgctattttttattcaaattcaggtctacttgctctaattcagatctcctgacctgtagaacattgtctgtgtggcctgctgttcccatgcccctagaaaataagtggactctactgattttctcaatactcgggactgttacttaacatttgttttaaattttgttaggaaatgagattatgacccaaataattatgagcagaataaattataagcataataattttgagacaaatatgagatgaatataatatcatcattcaaacttattaaagccatttatccactttttggggggctagaatggcattttgtattttccatagatggtttcaacaattttaaccattctacgtgcaatgttgagatgtggccttgtgtaaccacaccagaccaatctggttcaacttttatgtcatgaagcagtgagatgtttttcagttgccctgtgcccccagtttgaaggtcacataacctgagcatgcccagatgaaccaagagtgcaccctgggtagaatgtaagtgctcacattgagtggggactgaattacaaaacagatgccctatagcagaacccaggatccaatcaaatggagccttgttgtcaccccatgggaggatccagtcagatcatgcctcttggcatcacctcattgtgagatccaatcaaatcacatctcagcctatgcttataaaacctgacccagccctgctcaaggagacacatttgagcatttcttcctatgtccttcccagtttactggtgctttggtgtttggttttccaatgagtgcagacaaaataacctagtttggttcagtaacacttgccatcctcctttgaaaaggtaacgtctaactctcctcctcatgaattcaggctggctttatgtcttatttgtaaccaataaactacacaacactaggaagaatcactcagctgagtcctactcctgacttcttgacccaaaggacacaataaataataaaactgtgtgggcaacgtcttgatccaaaggatacaataaataaaaccgtgtgagcagttcgacatgtagcaatagtaactagaatagtaaccattgatagaaataggtgtgtggactttttccagaataaattagaatggatatagaaaaagagagggggcaattgtaggattgttccctggagagttaatggcataaatagtatagaaggaagcaccattggcaccaggctaggaagaggaagaagtagggcccatgaactgggtaatggagtgaataaaatatgagatgttaaagatacagaaatctcaattcatcttaaggctgcatgcagagggagcaaagaagtgaaaaagttggagaatctgaagagtcaggacattgtagtaagaaagggagtaaaatcctggaaattaaaatttcagaagtaaagaaattggggaataatgattacatgtatagtaagcttttgaataatagagatgaatgccgtgaagggagaggagattagagtaattttcaagtagagttttaatgggtattagtcaactcttgcggtggtggcaaacaacctcaatatctcaggggcttgcaaaaaaagacatcctctttcattgatgtcaggatgaagttggttatgacctggctctgctgggctcaggtctgtgtgcaaacccgttaagcagccagtgtttggaatatgctgttctgttggtcaggacaaaaggaatgagacagaatcaaacaataaagctgtaccttgaggttcagcccatatgcagtatacctcctattcatttaaattccaatggtcaaagaaagttacaggacctaccccaaaaccaatggggcaaaataagtacattttgcttctacggaaacatggtgaacaaataatttaatctaccgtggttgataatacagataatgaggttgttacaaatgttatgggttcctaatttgaagaggaagattgtaaaccagttgccaaagcttaaaaagacaatctttgtaatagaaatatatagcttatatcatcataaaattgccaaaagatcatgttagtattaaaaatgagctaggcaatgaccacactttggaattcatgtgctttccattctctaaagctatatcctacaactataaaccaattaagtggttaaacaaaacaaagtacatgcagtgaactacacacatatctgcaaaatttcactacatttactcttttcctttattggcaatttcttttttcaaaggcatcataatctcactacctttttctgctgataaaagtgcaggagtgaaatgctagttcattgagtgggctggaaaatcttcacgtctacagtcaaaagcttggctaacttcttgcatttctttttgcatttaattagatgctaaagatatagagacattatagttgaggaaactccaactatttgcatgactcaagcactaattaaaacaaggggttggacgtggtggctcacgcctataatcccagcactttgggaggccacggtggaagcatcatttgaacccgggggaggtagaggctgcagtgagctgtgatcatgtcactacactttagccttggcaacaaagagagaacccatctcaaaaaaaacaaaaaacaaaatacacaagaattttatttcaaggaggaacagcatggaagacttagttccacttctggtatgttttgggaggaaatacccatgagaatcccttggtaagattatcttcagaactttgtaactccagcttgttacaaataagggagaggtgaaaacttgtatccattcttatgtacagctttttctaagaatctcttgtattctataaatctattgcaatcacaagaatgagaatattatttgatatatcatgctcaataataacaaaatagctaatatttattgatctaagttccaggcattttaattgtacatagattttattgattgaatgatcataataacaactccataaagtattattatcaaatccattttataattgagtaaccaaagtatgaaagtttaactacaagtcacacaagttgcacaaggttacatatataattgttagtggtgaccagattcaaatccaggtagtgtggctcgaaaacctgaattaacctatgcaatatacccatggttctcaaactgtgtactgagacactcttggataatgtaagcaaactcctggagttactttgggatattttaatttttctagagaaacacagcaacatctattagacactatagatgactatatctaagtcatttaaacctgacttagtacatggaattgctatttcttttggcctatcgttgccttgaaaaagcttctgaaacactgagagtgttataatctaagagtatttgctaacctctgcagtatgctgtcttcagatagcaacttaggcatgtagtaggattccagacatctctatcgctggccaccagcatcttttacaactaaatcatcggcatcactgttttgttttgttttgttttgtttttaaattagaattgttagcactttttattttaatccttactattaacattattattttgagcagttattatcatataaatatgaaataagtttgggtaaaaaaaaattgtaaggagagcaacctgctttgtttttgctcactctgggttcctaaaaattgaatctaataggaagcgttcacctgatgcagctattcatggataagaaatgttagagtggtattttaactcaggacttcatatcaaggtgaaagaaatgtattgacattcactaatagcatagtttgtaattgaaactatacataatttaatatgcgaatttatacttcagaaatattctcaactttctcaagaaaattttggcattgaaattgttttctattatgaatcttcagtttttccttcctagaaatttggtgataattcttaactattaacattacagatacagttcaggccagaactgaaattttcttatagatttttggaatctgttatgatagtccacttagtctaatacaattacacaattcttgctcaggacacttattaactactaaagcattcgtaatctttgcttatgtacctgtgtaaggtttatattgaatatattaaccatgttcctgggaagccattgttttcatctaatattttctgctaatttttggccaccttttctccttgttatagaaaatggcaggacagagctctatttttctgcttctctaacagaatcactccgggctttccttttcttttttttttttttttttttttttgagacggagtctcgctctgtcgcccaggctggagtgcagtggcgggatctcggctcactgcaagctccgcctcccgggttcacgccattctcctgcctcagcctcccaagtagctgggactacaggcgcccgccactacgcccggctaattttttgtatttttagtagagacggggtttcaccgttttagctgggatggtctcgatctcctgacctcgtgatccgcccgcctcggcctcccaaagtgctgggattacaggcgtgagccaccgcgcccggcccgggctttccttttctatgcagtattaataattatctggccaaggccatgagagtcatgtttaaaaccctttaagataaatctctctgcttagcatgtgtcaatcaaatggattacccattcttcaggaacatggcttaacttgtctaaagccgttaaacatgaatccttacctcaatctccactgagtaatagtagcctgggtattttggcccaataatctgtctataattgggtggccttgttgatatactgcagggttataaactgaatgtttcaccctcaaattcttacgtgaaagccctaacccttaatgaaatggtatttggagatggggcctttgaaaggtaatcagggttaggtaaggtcaaaaatgtggggccctcatgataggattaatgtcctcatgagaagagacattagaaagcttgcttcccctccttttcgccatcacttgaagacacagcaaaaaggcggctgtctgcaaggcaggaagagagccctcaccggaacccaaccatgctggcatcctgatctcattcttttagcttccagaactttgagaaaatgaatgtttgttgtttaagctgcacagtctctggtattttgttatggtgacccaagctaactagcatatctaggtattcattatttgggttgcttttttgattgatgatcagtattctaatgtcttgtcaactaattttgtcatataataacatagactgataacctatatgcactataaattaaataaaataaggtcataaacaaccttgactaaagcatcaagcatcattgtttttgcctaaaatgaacagattctccaattttcttcttattgggctgaagacatgtagccatcaattattatctttagagaaaatttacaaaaatgtagacaagcaatgtagattcctactgctcagaaaacagaccactcttgctggcatagcacataactcagctatgagtgaaactgtagccagtctgtgactacgggggtaatgtccagacattgcttgaaatgttagaacatgtctcagtagcattatgttttgtaataacaagaattgtaaacaaatacaatcacattaagcctgaaatgctgaatgtgctggcacaatagatgattcagtatttaattctgaaatgaatataattttagtaatttgggagaatgcctctctgagtgagacttcttccttttttttttttttttttttgctttgttaaaaacttttctgaaagattagtttgtttacagctgttttggtgaccatcaattgaaaatggaaggaaaaccttaacatgccaataatcctgtatttttgtgtgtacgaagtggaaaaataagtactgtattgtatttcatacaccattgtatctgtgagttgagacaaatttagcatacaaatattcatataacttcctctatattgtagtattgcatgctattgagaccttatctatgagagctttctcattgcattcataaaaacaatttattaaaatacgaaggcttatttttagccatgtaaaagatatctatttactaatttcaaatttactgtttattgttaccattttgatagatctttctgattttgaccctcacctattttctttacttcatgcctttaaggtttctttctagggctgtgtctcaaaatgtgtctcagatataagagggttccccagtgctggtccagtgactgaggtgagaaaagatatataagaatataccctggaactttaaaaagtattaggcttggtgtctacgctcaagaaattttcatcttgtaagatctgagatgtgatccaggaatccgttattttttaactcccaatttcattttgacattcagccaagagtaggaaccactgaaatggttgagtattagctggtacctttcttgtttatgatgacctagtgttgaggctgatactgtagagtgcttggcctgtgaaacaaagtcgaattcatgtgatgattaattttatgtgtcaactcgagtgggccatgagatgctcagagtaaacattctttctgggtgtatctgtgagggtgtttccagatcagacaaccattccaattggtggattcagtaaagtagattgccctccgcaatggggcgggggcggggggcatcatctaatccattgaaaaagaagaaataaaacagaaggtagaagaagaaggaatttgcttttttttttttttttcttggctcactgagctgagacatctgatctcaccttctcctgccttcagactggggtttacatcctcatcttcccttgttcctaggctttttgagtcagactgaattacatcactgactttcctaggtcttgagcttgcatatggtagatcatgggacttctcatcctccataagactgtgagccaattcccataataaatctcatgtgtatatgcacacattcacactattggttctatgcatactgtatattataatcttcattatgtataaaatatttatataatatttaatatttatatcctatttattttatattataaaataggatatataatatgtatcctatctatcttatttctccagataactctgactaatataattcatcaaaacagtaggcagttccgaatatcatatcatctcttggcctgaggttctaaacttgtgtaataaaaactttgaacgacctctaaaaattgatgaatttgtaacgcaaacagacttcttttagttctccattatgtcttcatgggcagttttagtctttgctattttctgagattactctggttatcatgataatacaatttctttatcattgtcgaaattacattatctactatctagttagagatttatttctctttagctggaactatgtaggactctttgaaatatttaccttttctctgaggccactcctcttccttaagcctgctgattgggtatatatttggcttaggcaaattcatcattgttattaaaataatgatactatatatggcctactgattctaggctgattatcttaccttcatattagaaatcaaatgtatagagattagaaaaccatgaagttatgtagaaaagataaataaatcacttttttttcatttagactgcaatgagaaagaattggtagttattatgagagtacataggaagggtactaaaatcaatcttcaggactaaaaaaaatttttgtgagggtgacatctaggcatcatcttaaacaatgagcaagaagtagccagacacaggtgattagaaagatgttttaggcagaagagatagcatgagcaaagtcatggagattagaagttaaggtgtgtttcctgaggctgaaaatacttggatttgcttgaacatgagatatgatcagggagaaaatgagttttgattgcttatgagtttagaattagatagtgaagtacaatcaagtacagatgactccttctaaaggcagcgccagcccaggtaaaacaaaaatacagattcagcatcaaaagctgtgtctgactccaaacttcagtttttgtcactataccttacatgttatgatataatgtataataatttgacagcatcgataccacttggttaccagaaaaaatgcatatgatgtaagcgtgagggtaagagtgagttatcattttactctactgagacaggaataatacagggtgattgcaggagaatagaaaatttcaggcagcagttttacatgactagcaaaaggaagccggtgaaatagctgtgtatgttaggtaatagctgataaacccctaaaaaaccagagtgtgggccaagctggctaagactgactggtccctacatagtgctagatttgacctaggtttcacctaggacctcattatctgctcattaacattctcaattacacacccaccagcaccaggacagttctgggaacacgtatatctagtgtaaaaatgggtggcactgtacttccaagaaatctttacctttttccaagaatcttcataaatattccactccttggttaaacaaacccataaaggtagaaacctcaaacctcattgcacaactcactctcctgagtgcacccacacccctctttatttcttgtgtacttttcattttgcaatacatctccatacttttcactattttctgactcatccttgaattccttctcacgatggtgtcaagagccttgaaaccactggggttgacatcccactggtgtttgaggacctcccttagcacactggtatcactaccactcttctttaataaacccgtaagtgcctgattatatattagaagctgatggaggtaagataattgcattctccaaaggcttctcttgaatagatgtgcttatgaaggagattgattgtaagttcctggaggtcagtgataccttatttatacttctacgtctccagtgcttcacccagtgctagtacagtgggccctttatatacatgggttctgcagattaaaccaactgaagaccaaaaatatttagaaaaaatattccagagttcccaaaagtgaaatttgaatttgccatgctaaacgtactactatgttgaatccctgtgaatgaagtcatgtgtaggcattgtattaggtattataagtaatctagagatgatttaaagtatacaggagagtacacataggttatatgtaaatattttgccattttatatactagagttcagcatccttggattttgatatctacaggcatcctgcagtcaatcccgcaattgctagtgagggatgacttgcatataataatgacttaattaatcttatttggatgaatgtaatgggcgggatgaaacagctaaagataaggaactaatgccatataaggtactcttaaatgtaaaatcatcataagagtgtataaagttatatgtaagattaaaatatagaaaaaaagtcactttaataagacatttcactttgcttccaacaggcacgttggtatctggagagagaggggaggaggaggagaaaaagaaacagatagacagaggagagagacaaaaccaaaattagttgctcttgatattaatttttcaattgatttaatattagaaaccacaaacatctacaagtgaaatgttatagtttaagaatcaggcctctcaccagaacgatcaaaacagtggctccacaaagtagaagtattacactagttcaggagaatgtaattgcagacaaacaaagagcccctatgagttccaatgattgctatgagttcttttataacaactcaaaaacatatatgctgttggaaaatatttactggtcatgaaagcacagcgtttaatctgctttgtttctcagaagcctgcttacttcaccccattctttatttttattggattcttttggagaacacaaattacaagaggcatttgtaagcaggaaggtgattaataataaaaaccaactgaaatgatgatgtattaccattcgtgctgatgtgtagagaccaaaaatataaaatctcaacagttttccctgattgcactagaaaattaaaaccaaactctggatatgtggaaagggtttgattagagacaggtgaaagcattaggttattctagaatcctctgtggttttaaggttgggtctctgatagcctgtgcatgttcagaccaaacacatttcaaaatgctgcaggggccaagtctgtgcttcatcgtaacagagacatggtttcagactttgggaatgaagaagtataaggtcatgcaatgaactctccaagtgcaaagatgttaatttgattatgaattcctgacaattccatggattcacttcattttgcccagccataagacagaagcaattaaaatgattagtctttaattatgttttagtcatctatctctttttgctgtctttaaaggatgtgattttcatttaaattgttagccaactttcattctgtatcattttccttagtttttataatgatttgaaaatacttcaacatacactatacttcaaaattttacttagttgcatgaatttttaggtatcagctactcaccctgtaatatctcatttccatcataatcaaatgtaaattttatttcattttattgtgataagaacacttaacatgacatcttactcctttaacaatttaagtgtacaatatattattatggactctaggtacaatgtacagcagatctctagagcctatgcatcttgcttgactaaaactttataccaattgattaataattccccatttccttctcccctcagcagctggcaaccaccatttcactctttgattctatcaataggactattttaggtacctcatagaaatggaatcatgcagtatgcgtctttctgtggatggcctatttcataaaagttcaactatgttgtctttgcagaattttcttcttttctctaaggctgcatcatattgcattgtatgtatataccacatttctttatctgcctttcatctctcaagacatttaggggccgggaggtggcagctcatgcctgtaatcccagcactttgggaggccgaggtgggtggatcaggaggtcaggagatagagaccatcctggctgacacggtgaaaccccatctctactaaaaatacaaaaacaaaattagccgggcacggtggtgggtgcctgtagtcccagctactcgggaggctgaggcaggagaatgacatgaacccgggaggcggagcttgcagtgagccgagatcgttccactgcactccagcctgggcaacagagtgaaactccatctcaaaaaaaaaaaaaaaaaaaaaaaaagacatttaggtcatttccaatgttgactactatgaggtagtgctcgataaacataaaagtgctaatattttttccacattgtaatttaattatttttgataaatatccagaactgggattgctgaattatatagtagtgctatttttgttttaaggggggaacttctacactgttttccatagcagctgcaccattttgtaatcccgccaatagtgtggaaaggttccaatttttctacatcttcgtccaacactggttgtcttttgttttactgataatagccatcctgacagatgtgcgaggatatctcattgtgcttttgatatgcatttttcatatatttgttggcattaatatgtcttctccagagaactatctagtcaagcccttagctcctcaaaaaattctggttattaggtttctttttttctgttgaattgtaggagttacatatatgacattttggagattcattccactacgagatgtatggtttgcaaatattttctcccattatgtaggttgtcttttcactctgttgatggttttcgtttgttgaaatgtaaatttgaaatatttagaaggcaaatgaactttggtgctttggttgtgctatagaggaaagacatggggcctttgaaagtgaagtaaaatgtcaatgcagataggcagaaggggaaatagagtttgcgcatgacgtgcactcaggtgtcagaatttccttgggctttcttttaaaatgttggattattatttttcttggatgctactgatattttcataatcatccacctgtttctttggttagttacataaaaataataggtgatctttcccattttagccaaaattgtcttgatattcagggaactggtgtgtccccaattgatttcaatccaaagaaccaattttctttggaataaaattatttagacaatactgattttaacacttcatagaagaaaggtggtaagaaattttctgaaagggaagtcatagaaatttctttgagatttggtgttgacttgacacacagacacacacacacgcatgcacacacacagaaaatttaactattatatatgattaaattttctcctgctgattctatccgtgtgtgacctgagacattatttgagaccttagcaatcttcaaggttttatctttggtgtcctgttaatccacttatttaaactcaactgatgttcaaaaagtgcatgaactccctgaaagaaaaaacctcatttttcattccccaccctcctgccttccttgatttgtttacactcttgtgattactgtcatttgattgtccagctatttctcactgataactatccctgttgcaatgattatgaagagaacagaaaagtgaacacaatgttctcagttctgtctacattcagaactataatcttgcggctgcctttggagactatagtagaagaataagatgcactttcttctaagtttggcagagggctaatgtttggatgggaaaatatgttcctttttttttttttttttgagacatggtttcactctcattgtccaggctggagtgcaatggtgtgacgtcgctcactgcaacctccgcctcctgtgctcaagagatcctcccacctcagcctcctgaataactgggaccacaggtgcataccaccatgcctgcacaatttttgtattttttgtagagatggggtttcgccatgttgtccaggctggtcttgaactcctgggctcaagcaatccacccacctcggcctccaaaagtgctgggattacagtgtgagccacggcgcctgaccttatgttcaattttaactgagattcacattttacatatttttgatcatataaagtcagttggagaatgggtagttgatgggtgcagacaaaaaataacttcactttcaatcgctattttatcttgttaatcaaactcaatcacaattaacaaatattaagcacatatcatccatccattgctccgatggaaattgggaaataaacttgagtcaatagaggtgacttatgtgttcattgactatttacacaaaattatcatagttatctgtgagtttggtgactaaaataaagtattttttaagtatgatttcacagctgtaaagctggctttgtctatggttttgatgtggcatttctagaacatagcctgtaatcttatattttgatattttttcttttatttctgagtctcagttaactatttaccaatatttataagaagacagaaccaacccaaatgtccaacaatgatagactggattaagaaaatgtggcatatatacaccatggaatactatgcagccataaaaaatgatgagttcatgtcctttgtagggacatggatgaaattggaaatcatcattctcagtaaactattgcaaggacaaaaaaccaaacactgcatattctcactcataggtgggaattgaacaatgagaacacatggacacaggaaggggaatattacactctggggactgttgtggggtggggggaggggggagggatagctttaggagatatacctaatgctaaatgacaagttaatgggtgcagcacaccagcatggcacatgtatacatatgtaactaacctgcacattgtgcacatgtaccctaaaacttaaagtataataataaaaccaaacaaaacaaaaaagaagacaggttgacatgaaacaataaaagattgatgtggtatgtcccactgggaaaactgtccttggatatatcctgaatctttttcatgccttgaactgacataaaagtctttatttaaggaacctttttacaatatttaaaacatatctactgctcactcattcacagaaacatcagaaatcctgaggtcttgatttaattaaggctgattgacatcaggcttctgaagtacaaaatttgttatcctgcctgtgatatttccttcacatattctttatgaagtcattgtctccaagaagtatctccttttaagatcctcagtctgccctctcatctggttcccataggtaaatgtaaatgttacataatatgcatggacagtgtgtatttatatttacatttacccacagtgctcaacccgtgtcttaggcacttgttcaaaggagggatgcctcaactcaaagacatccaggtcaaaaacacatttgtggcatattttcaatcatttccaaatgtacacattcagagtgggataaaggagtggagaagagtcatgcataagaacttcttatctttttggagactcgtgtctaaagatgtttccgtaaaaatgtgggcatgcttccagggactagtgaaataactttgcactttcttcgctttccttgagatgaaaaagagaacagcaggctgattcctgtgtgtcctgactccagataccttaccgagcgagtgaaccctattgacttgggaggatcctgcaattctagaggtgggatatggtatggacctcctcaagcctcttttgaaattactgtttaccaaaacaactttttaagaagctagcttagtgcactcagaactttcattttctagtacatttgaaaatattttcatttttttctttttcttatttacatgtaacagtttaaatccaacatttttatagtagctgccttctgtaagtacccccattcagagttctgccaggtgagtgggtgtgtatcccaggtcaatctccttgtgaaactgcttagagatggcaaatagttaaggcagcaaaatcatttgcgtggctttctacatgcagtagaacaacactcttcaaatctctgtaaatgcaatttagtacatgaatttttaaggtggaaaaattcaatttcttcttaaaatggtgattttcctgattctactgaaaggatagcccattgtaagtctttggatctcacaggcaatcaaggtccctgggcactttaacaaaaaataactaatactattaaaagcgtcactttaagttcacaagaattttcttacacacagatatttaaggaattctgaaacaatgtcaacagatttgggtaagttggtaaagtcattttctattatttattttaaagtggtttaaaaactggactgttttgtagccctgaagcctcccttaaccacgaacaccaaaatagccacatggctcctttttatcggctgctacttaaaaccaaactctgaatcatttgtgggaatctgaactttccctgggagtccaccagcatctaatttctgtatatggataaattaaaaaggataatttgcttcagttttaatttcatctccattttcttattttccacatttcctaaacttcagcaatcaaaataccacacttctgaatctatttatgttttgtttccattttttttttcaatggctgggtgtacattttcccttaaagagactttcacaacattttttctatgcccaggaattgctgcattcttctggtgacaggctgctcactctgtgccacagctgctgctccaaacagcaaaggctgagtggtctggctcaccatcacgggactgtcagtccattttctcccctctcctactaacctttgagcacatgtagaaaagaaaatcagtatatggttttttctctgcctcatttgctaattaacttcctgttcttcatgcattgcaagcaaccaaggtcacagagaaatcccgctgctaccaagttaatagttatttcacagaaaatactgttgtgtatcaactcattctatccccaaacctgttttcttctcctgtaagatagtctatgaaaccacttatagtaactggaacatagatgtagaggtaattgacattattgaatatctatggtcttcttgggtgacttggtgaataatttatattatgtgttgagtgaacttctttatttttctatttatatgaccaaatgtcactacttggaaatcctaaacattccacttattcattcctacctttttggtttgatatcgctgagtcctatggtgacttacctctattggccataaaattattttatatgaatgttttattttccttaatgaattgcaaggactctgttttactacttttgtatcctccttctctgcctagtggtactggtaataacagctaacatgtattgagaagccttgatggagcaagcctctactctttgtatcagtggtcacatttaatctttgtaggaactctaatggaacaacattattgtcctcatttctccgatgagaaaatggaggcttagggaacttttctgaggttacgtagatagccagttgtagaatgagtatgggatttgagaaaactggactacagtgcctttaatactgcctaagtagactcctggacatgcactgtataaacctaacttcgggtccttttatttctttccccttcatactactcattcatctgcagagtttgtgaagagaaggctgggtagagcctgcttggacgtgtgctttgatgcaccgagtcaggatttggaaaggctgaaggtctattggcctctgagttttctgatgggaacctcaactcctagaaaactcctgaaacaaatcataacctcgtaagtgccattacataaaactctagtgatgacagtggcaggccatctggagcagctgctgccaccatgccagctgcagcagggaggtgcggcctggctgcatagtctatggagccagtggtagctggaaacaagcaaagccccgccccttctgtgttagggcagaggctcccaaggtgctgcttcagctgcccaagccacagctgcagacccaggcatttctgtgctcctggggcccagaagcaggcaggaggcccaccctcccaggtgcagctgcagccacccaagtcatggctgtagacccaggcctccacctccacggagcaggcaggagtccgactctagccacccaccgcctcactcctgcacagtggcacctgcccaaaccatgactgtgaacccaggtatctttgcactcttgggggcctgggaaagccccccttcacttgcaggctcagaagtgcctgctcccactgcctggcttctccctgctgttggcatccactccgattctgaagcaaagtcgaggctgtactcaggcactgttgcagcctggctaggtgtgcacacacagggcagtgctgacacaccagctccctggcaccttggcccaacggtgccaactttgggcaccaatgggcatgggaggaagcttaggggaaactgagagcagcttggtgctggccttcaggcaccccttggcacctacagcctgggcaccatgaacagcagcaggaggctaacaggtttctgggtggaaggggctgggtccctggtgaggcctcaccttcaggccagggagggcctcaaggctggtgcctgggttgccagtcctgcagactggagtaggaacttgtggtaccttttctgggcctgcccatggccgttcatggaccaactggcatgcacttcctcacatctaaggcccataaaagctccaggctcagatagacctcatcagacattgggatgatcagctgcagggaggagctacccattctagggcctcctctctgctgagagctgcagagatgtcaggacaaccagctgcagagaggagctaccctctccagggcctcctctctgctgagagctgcagagatgacaggatgacctgcctgcagagaggagcttctcacttcagggtctcttctctgctaggagccgaacactttttgggacaccctggctgcagaaaggagctacccactgcaggtctccactgagctcttctatcactcaacatggtcctcttcaccttgatcaccctccacttctctgtgtacctcattcttcatggtcacaggacaagaactcagaacccattgaatggtggggctaaaggagctataacacaaacagggttgaaacatgtcccttgcttaccacattgtgggtaaagagaaggaaagaagagctgcagccctttggggagcccagatctgggaactccccagagctgtgactccctctttggaatcctgtggttcctggcatctccaagcttctgtgcaccaccacgttccccagtgctagctgtggaagctgcttgcagtgtgtctgatccagccacagcctcacagagagctggcacccatgccagcacctggagctgcccaccccactgcagcacctggcatgtctgattatgcagtggccagagtccatgctcactcacacacccctcgccgctctgtggttgacttgcccttggcaggcgtgggatccagactggtagcatgagctaagcgcagcccaccaggctaagtgggcagaacgaacccagcaggcccgagaaaaacccgggccaaggtgccactggccacagaggtttctggccaaaaattgacaccccaagaatcctgtaacactagtgtagtctttggacttgatatttttggttgccattaaagccacatttttttctatgtacttttcagtatggccttttagcaatttttctttcactaaaaaacatttttatcttctcttaaaaaaaaaaatagaaaggaggaaataaacacgggagtgatagctataagaacagcccatgccttccctcctctttttccttctctaggatactcactacacatccagtgtatagataacttcatttctctaataagcttctagagggcagggatcacgtttgttcataaaatctctctaaatgccacctacagtaagtctccaaacctagtcctaaacaaaccagcagataaggaaaacctcatggatttgctaaagtttgtttgtttatttatttatttatttttgagaaggcatttcgctcttgtcacctaggctggaatgcagtggcgtgatcttggctcactgcaacctcagcctcccgggttcaagtgattctcctgcctcagcctcctgagtagctggaattacaggcacccgccactatgcctggctgatttttgtatttttagtagagacggggttttgccatgttggccaggctggtatcgaactcctgacctcaggtgatctacccgcctcagcctcccaaagtgctagtattacagatatgagccacagtgcccggcctaaagtttcttcaaaagtgaaggtgaaacagtttgtggctcagctagacaaaatatttttcttttctgcccaatttgagtctagaaaaaaataatgtccttaaactatgttgtttctttcttggtaccaatctagtatctttatgagggaatacataatgtaaaattctttatttttagttcatcttataggtcatttctcctcattctcttttgctacagaggaggaagagactgggacgtcattcctaacaaggttcactctctcattctccatttgtaattaagcaacaagtcttcttccaaaatccatatcacatcagtccacttattccaaacctatttctgtcacactaaatcaacatctctaacttgggttattacaaactctcttagttccctaacttctatttatgctcctctataattcatttggcatacaatagctagctaaagtgagcttttctaactgcagtaataataatgacactttcttgctttaatctcttcagtagtttattgccattgataaaatccaaaatctcttaagtggtctataaatttccatgtgacctttaccttcctacatctttactctcatcctctcccaattgaaatcagtgctccagaaatcttagatttcgagttgcccagctcttcctaccccaggaccatcacacatgctttaccttcaacacccctaccccctagtgtaaatgcctattgtcaagaggaattcccaaatctccaatggaaataaggctctctattacattctttaactccatctgcataagttataagtacttaaaacaatttgggattttgcctttcagtaaacactgccctgacccccacttcagaaccaaggaactcattcttctagctgccagaggtgttgcccattaatggccagcagcatagttattctctagaaactgtcctcagtgtaagaaaactgcctcatcccaggttatgctccatccctgtggttgacccatatccaatgactggttgacataagagcacaaagctctgtcctcttgctccaaggggatcactctgaaggactctccaagttctaaaacccccgactggattggttgaggcatctcttgcattgcctcacagttaaacacttctctatcccaaatcctgctttccttattctccaatgaacttgctacacataaaactcagaatctcaatgtttatttcctagtgaacctgacctatgacagttggtattagaagttgcactgaaagtggacccaggaagctgactgtgatgggaaatcagtgaaagaaaatgtccttagagaaacactgttttatccattttagaagttggaggagggtattaattataaatactgtggaattggatgtttatttatgatggttatcaatttattagaaaataacaaaaagcctgtgatgaataatcaatataaggtaaagcttgaaagccagtctccatagcaacatataaagtttcacatctctagctagtggacagaaaaaggtgattataacatagaacttaatttcaagagtagctaagctccagagaaagtcaagttcttaatcccaacagatctattatgccatcgtcagggcctttattgggaaagagtgagaccctgaaagttgggttggttatacctgggctgatgcacatgagtgtcttgaatctctttggacattctggccctgcagaagtagcccactttttactgatgaggtttatctgcatttgattaatctcagatgatactctcacctcttctgctagccaatagactaatagatttgaaatgcaatgtggcattggcccagctgaggaagtgataaattagttaaggaagacactgactatggacagaaggagttgcaggacctagccagggtagtatatctgggtctggatcttgagggtagtggatcaagggggataatatgtaaagttggatgaagtagagtgtgttgatacaggatatccctcctgtagtgtaggattttataccttggtagcaaccttgggagatggtactaatatgctgctagaatgacttttggaaacaagtaaaaggaagccgggcctccttttacaggttaacgcctgtaatcccagcactttaggaggctgaggctggcagatcacttgaggtcaggagtttgaggccagcctagccaacacagtgaaaccctgtctctactaaaaatacatacacacacaaaaaaatagctcgtgtggtggtgcacacctataatcccagctactggggagtctgaggcatgagaatcacttgaacctgggaggcagaggttacagtgagctgagatggcgccattgcactcaagcttgggtgatagagtgagactccatttcaaaaaaaagaaagaaagaaaagaaaacaagtaaaaggtgatagccactactaagtgaagtagcaatgccaggattgccatggaaaatggtagaggaagggttcaaaaggctcagagaagtggacatgccaattggatatgcaactgaaggtcagaaaacctacccactgacaatgttgaatgagttcagaccatccaaaagccacatggaacagtcttactaaccaccatggaagacctaagaattgaatccttccctaggccagttgataaaacttgattgcatcctgtgagagatttgaagtagaagacacagccatcccatgcccagactcctgatcaaagaaataaagagaaataaattcatattgttttaagctgttgagttttggcataatctgttacatagcaatagatgataaatacattaacccaggaaaattttaaaatagattcacataaaaatcagtacataaatgtttaaaacagctctaaaatgtataattttaccaaactggaaacaatctaaatgtccttcagtagatgaacggataaactatggtgcatctgcacaatagaatactactcagcaatgaaaaaggaatgaatcattgttatatgcaatttgggttaattttaaatgcattttattaagtgaaaaaatccagtttcaaaaaattacttgtgtatgattacatttacatggcattctggaaaaggcaagagagagaatagctcagtgattgccagaggttagaggttagatatgtgtctatgtgtctatgtgtgcatgttgtgggggattggaatgaaagagacggcacaagagaattcttcggtgtgttggaattatcctgtatcctacatacagtatagttacaaaaatttatgtgtgtataaaaactcagatctgtctaccaaaagcagtaaatgttactcgaggtaaatgaaaaataatgctgctgaattccagggggaatgacagaattgatgccaactttaaagagctaaaagctgcaagaatgatgatccccatcatgtctctgtttaacccaccattctcgggcctgctacaatgctgcacagactctgttgaacgacagtaggatatcacagactccatcaactagaagcctcttgatggcagcagtggtggtagatactgtatctttgctagagcagattgatatggcttctggtacatagcatgtgaccactgacttaattaatacatttttttttccatcactcttaggaaggacaaccagaaacagtacagaatcaaatttgcatgggatagaaaacagtatatatttatagtcttgtcccaaggccaaactaattttcctcccataatcagaataaagtctgaagggatatgggtcaccttggtattttgcagcacattacactggtcagctatatgggtgatactgttattattggaatggatgaacaggaaatggaaaatctattggaagtcttggtaagatatatgcacttgaaaggattgccaacctaaaaaacaaacagaggctttctaaaagaaaacacttatttgggaataaaatattgcgatgggaatatatgcatgccatagtaaatatgtgcatattcagggaggtaaaggaagacaaaggtttttaaagggaaaaactcaggagtattacttaattgttttgaaataattatcctttgtaacaaagatcaataacaagagtgacgacagtcgaggttagggaggcagttgctgggcagatgtcctggcagaagtatattttgtgtaaagttattgtggtctttgtgaaggttgtggattgtctcatttttgttgttgttgttatcaagcatacaagtgtgagaatcctctcttcatggccttcactggccctatctgtcaggattttcttaacattagtgactccttctgacaactttcacagggtggtagataaaccctatgaaggtacaggtgcccattatgtcactaaactttctaggagtccagagcctagaacatgccaggacaaccttcaaagcaccccctccacctccaaggcgaaggagaaagcatgttagtcctgtttgggttctgaagtctacaaatttgtagcatatgagatttctgtttttcttcctctgtgtttcaaaaatagactgtgcccttcagcacctaaaaaataatgaaataacgtaataatattcataataaagaatagcatctcatgccaggatttccaatatatcctgcctttgttggtggtcagcagtaggaagcgaatccctattttcctcagcccagtcatcctcagaggacactggcaacgggccactgtaaccacagggaaaattagacatatgacaaagctggaggctaaaaatagaattcctttccgatcagcttgttctatgcaatgcttttaatctggggctacccttcgtatgatcactcagtcacatggactaatctagtatcatcaacatcaagggaatttccaagacactttactatagcaaatgaaattccatttttaaaaataggaaaacaatagtggtgttcagacgttttcctggatattttctggggaaccttcagggctactaatgtgtttgtctctcaagtatgctttaagttatctttgcttggttcatagactcttttaaatgtctgacttataaccacatcctcaaaatacattcataaatacatttgcccagctttgcctacagtttcaggtaagtagcagaactcctgaaaagccctgggctttatagactcccatgggtaagaaacgctgcgttggacaatgtttttccatgccatgtattgaattgacatctaagccagcaacattaatacaatgatctaaaaaagagctttagacactgcagctattaaggtgtgaaaattctagttagcaacagggacatcctctgctggagatgaagttctatgttttgttatactgagctgctgagtaattcttgtttgttcagaaatcaaaatccatattcttctttcattgattgtaatttcagtgggggcaaacaagtgatattaaaagttcgagctgttgcttaagcctttagttattgatatcattataagatcaagtcattatttattatttactttggcttgataaatagacttgacgtatatgcttacttataagttcctcctgaaatcatgctatgatgaaataactaataatggcatttaaaataataatggctataggtaatgagtacttatatgcaagcattgtgctaaatgctttggaggcattgtctcaatgaagttgtacaataattctcccaggaggtaatattattcacattttacagatgagaaagcagaggtatagggaggtaaagtaacttggccaaaagtctgtatctagtaaagtacaatgctaggattttgaccacaggtcttttccattcctaaagctttgtattaaatagctatgatataatgccttttttgtagaaaaagaaaaaagataaatttaagaaaatcttatttattattttttcctttattcatacaagaggattatttctttattcacacaagaggattttcttcatgaaaacttaaatgttaatgttattgaactatagcttatagataatcaaatacaacttacaatattgcacataatcatgtgtctcttttaaatgtttagttcaacttgacaaatgtatacatctgtataaccaccttctaaatcaaggtacagaatatttttgtcactgcaaatagtttctttatgactgtttgcagtctcccacctttagcaatcaggtttaatttacataactttagattagttttgcctattctaaggttatataatagaatcatatagtatgtactcttttgcttctgtcttcttttgctcagcatatttctgagattcattcctgtacaagatacatgcacaaaacagtagcttgttccttttttcctgctgactagtattccatgtcatgaatatccacaatttgccatctattcccttgaggtgggacattttgactgtttgcagacttttgactattatgtttaaatctgctataaacattgaattacaattctttgtgtagacataggtttctatttctctaggattaaaattaccaagtcacatggtaaatgtatagatgtacatctttacaggaacttgtcaaactgctttccaaagtgattttatcatttttccactagcaatatagtagagtttggatggctccatacccttgccaacactcaggactctcagtttagccattatatatgtgtgaagtgtcactgttggtttgtgttttcctgatagctaatgatattgaacatatgcttattggctattcctttatcttgttttgtgaaatatctgttcaaatctttgacctattttttaatgagccatttgtaatatttgactatgtatatataaatatatgcattctggatacaaatcttctaaagattatctagtctctgtattccacctctctgttgatatattgaaaattattctagtctctaaattgccatttattttcttcacagtgtcttttcaagagcagaaattctacattttgatgaagtctaattgatacatattgttttcctttcattgttcattcattttatgccctagctaagaaatctttgcttattctaagtctgcagatttttctgtatatttggtccttgaattttttaatactattccacatgctttatattattactttatgtagagttgggtataggcttaatttagtcctcctctgaaacatagtctttcatgaatgtccactgaatgccctagtgatcaacaagtttcctttacactgattggttagaacagatataactcctacttgttaagctccagaaataattgttcttttccaactgcttgttttttatccaatctcagagtctcaccctatgcacgtgcaggttagagttcagccaaaggcttaagaagactcttatgaagatttctggaggtattttcctagttttctcaggtacatagctccacaaattctagctgcttttgctttcctgagttccgagatcgatctctctctctctctctctctctctctctctctctctcactctctctctctctctctttctctctctccctctctccctccctccctgcctgcctctctccctccctccctctccttttccctcccttccctctcatcatttctctccagcttatggagaatgtcatgccctttctgggtatctgagctatgtgctggttttcagtaaagccttcaagatagcaagatagaaagccaggatgatcagagaaatcatttcatttgtttctcttttcttgaagaccacagtccttcccagccagctgccaaatgtttgaaagccattttacaaatacattttttctacattctagttttctgtgatgggaagatcaatctggtgccagttattccttcatggtgaaaacagaaatgtaacatacagctttaaaatggacttcctttgttatattggtttattttaatatattcttctttcttttttaaggcaaatttgaagtgaaggaaataatttgtcttaattaaaatatttaaaacagaccgcatatgtatatatatatatatatatatatatagagagagagagagagagagagagagagagtgtgtgtgtgtgtgtgtgtgtgtgtgtgtgagagagagagagagagacagagttgttgcctaggctggagtgcagtggcacgatcttcgctcactgctgccttgacttcccaggctcaagagattctcccatctcagcctcttgtgtagttgggattacaggtgtgcgccaccatgcctggctatttttttgcatcttttgtaaagacgaggtttcaccatgttgcccaggctagtctcaaactcctgggctcaaggaatctgccctgcctcaggctcccaaagtgctgggattacaggcatgagccactgcgcccggctgaaagcattttaaacatgtattaactacttagtagctggtcctgtcttctagctaataacattttaatttttttataatggcataagaataaaagttttttatacccttcatattattattttttattgaggatatagcatcctagagtataggtgatttggcagaggttatgaaattacatttaattccatgaatgtattaatatctaagagtcattgtgcatttcctaactgctttattttttctcattgtattttcccaacaactctataaggtagactctataacttgccccattttatagatgaggaaacaggcttagtgaaattttttaaatggtccagttcataccactagaaagggcaaagcctggagttttacatgtctagtctgatcccagagcctgatttcttaaccattatagtaacttgttttcttattgaatgaccactatgcacctggccctaggtaaagagaaataaaattttatttgttttctatcatcaatgagctaacaaattggagacggggagacagatgtatgaacaaagtaccgtaaacatgagaagtgctgaagtagagtatgtgtgtgaacgaggctaatagagtgtgggaaatgagcaatcttttggagaagaggagcaggatgtacaaagatatcaaaatgagcgaggaataaaatgaagcatgaggtggctggggggttgaaaggtaaactactgaatatctctgccaatggaaaacctctaggaagccttgttataaatgaataggacagggtttcagctgttaaaagcatcccatctactaaggaagagatgaagtacacaagtaggcacacaaaaaatattttttaccactgggaaaataaactggtgtgagagtctaggagaacaaatattcatccagtttagggaattgcataaaaatctctcagggaggttgccccaaaattgggcacagaagcagcatctggcccattacacacaaaaacactgggacccctagtttccctttgaaatccatgaactgttttgtattatgatctatggaaaataaagtgcttgcctttatcatatttggtttgaggggatctgacattttgccttgtgaaatgtccaaagctgaatgtgttatgtttcctaaactctttgcaaagtgatcagtgttatgtaagttgagaattttgaatcacttacaacaacttgaaaattgttcctcatatttgttaaaagagcccgttcctagacatcatgtttatttctccagtagtgtcactagtttttttaaaattaagaacttaaaaaccttcagccatgtttttgtagacattacacaatgtgtttctcgagcacatgcaaaataatgatacagggaactcatttagcttagaggggaaaaacagcaggtcaatttaaaagttagttaacaaatattatgatttgttatttaacagttggcttcatctggtatttgaacattttctcaaatgcaagtgtgtggggggtattaagatttatttgtgtaatatgcaaacagctttggttgaagtgtgactggcatatttaaccaaatcaaaaatgagaagaccatacatcctggagattttttgggaaatatttacaaacatacaaaaaatagtgttaattttccagaattttctgaatatttctgcatgtaattttttaaaatgaagaacattcagaataattactcagatattctttttcttgtgattcagcatgagccatatcattgttgtaatatttcagtatactgtctaacgctgttgaggctgaaatctcactgggccagtgttaacctctctctcctcccattgtattttggtcagttaatttgtctgtggacatatttttccatgcatctcatttgtacctttctcctatcaagtgtatggattttcagattcttatcttttagaaggatgagctgctcaatctgtggtctgtgatggaaggcaggtagggtgagttcatgaggtgaattcaacaccttcagatttcagaataaatttttatgcatctgcagaatttaagattagtagagcttctggaaataatgaaggtactcagatatactgagattgttgttgaattcatcactttataaacatttccatccatgtgcatttgtatatctttgttagagatatctttaattctctattttgtgattatgtgtaaagacatttagcgatacatcttatggcacagcatagcaaataatgaatgggataggatcatttctttagagacattatctttactctttgggaaccatggtgaaccaagggttccattagtgtcttaggaggtacagtcacagctttcttgataggaggtcaattgcaattgaagacaaatgattagagctgttctctctgaagtaaacagaagacactgatgttgatattatccaataactgaaaagaaaacttggaaaagactgaaggagtatgtcttcatggcccttcagggaagaagttatcctaactaactggtagaacctctggttgcgtgagcggggctattgctgtagatttcttcccagttcttactcaccaggcagcttgatcttcatgtcatttctggagtaaatttctctactaagaagagaatgtgttgaatagccaacatgaatatcagtctgtttggcagtcagagcctcataaattactctgttggttctttgacacaaatcagtctcatgtgagtttgagttgcataagctggtttttttttttctgttgctgttgtgcctagttaccactgacaaagccgatcattaaatatcatcttaatacacatataaccccaaagacaaaactctggagtaaagaagaataacaaacatttttgctaaatacctacccatctaccctaccccgattataaaagcaacatgtgcttttatacacaattacaaaagccattgaataaacaattggaacttattgtataaaccattgtagacattgcaaaacattgtacacagatttatatgtctttctgtctactctttttaaaagcataagttacatggttaaaattgtaggaatacagcttaccattattgaatgtttatggtatactagatactgtttaagtactttatgtgcattaaatcattttaatcccccgaacaatacatgaggttggtagcattattatcccattttgcaggtgggtatatttaggcatagagattttaaaataacctgcctagtgtgacaaagtaagtagtgaagctctgatttaaactgagatagtctaactttatagtacaagttcttaaccatcattttgctattatattttatctataatctgtgtcctgctattttcagttcacacaagtcaacacactctctacataattctaaaactttgaaagccttcttgaccatcaaccaatctcccatgactacatgaccctcaacttgactttgcactgagaagactcaaatttgaattttctctaagtaataaaatactttcctccctttggtagcaaagctgggttctttaagaatcacatgtagaatcagataacaagacctaaatgctattttatatctccttaataatcctaaatataatatgtattatgttaggtatttgaaattttacctgagaaataaaatcacaaacattatctaacattattgccttgattgaggattagctcagattgtcccaaggcaaaaatgacaaatgaaagggatctaaagaaaagatcatgatactgtgacttgttcttcttcaaaaagtgctattcagaatacgaactaattggctacatacaatgtgcaaatagttctgcttgctaatatatttctacctactgcaattttagtcacttctttagttcagttccctgtccaaaagtggcggtcaagtgaattttggggtgagggcttggctttctctttcaaggggtgatcctaggaggtttacctttgtctgtgacttttgtatcctttttctcaaaggctatacttctttgagtacaaaaattgaaaatgaacaagaatgcaaagtttttaaccaaggttattaatctggaaatgtgatgctttataaaaagtactaactttttatttgttttctttgttttttgtttatgtgtttgctttaactttttttttaaactgcctatttaatgaacacttagaaagaaagcgaggatctttaggggctgctaagggtttactaacatccaatcttttgaaacctgacacatgtttgcccttcctcctgttttcttccttcctgccctccctctccttccttccttccttccttcccattttcttttctttcaagtaatactatattgatagattgaacaaatgctttaaatcttatttatacaaatattttagtaaagatcctcatggatatttctgtaggccaggtaaagtaatgtgcatgaaataattatatggtgggaaaaaacatgaccgtctacattgcctcgttccaagaaaaagagtagggaagataatcagcccaaaataagttttcttaatgaaccactttcagcttttttttagcggggtggatgggtgagaagacagtctcaatatccttaatagcattacaaacggctattaacttacacagtatcagaaagttaatagcatagtaataatttataataatttagtaataatcctggaggttttagataactgtaaggaacttatgaatagtattttaatatggtaaatttaaaaacagctaacactaaacagcttggatggaagtttactagtctagaagtaggcagataacagaatatttgtaccccctatcagaaagatcacatctttaattttgtgtttaattctaatgctgcatttttagaaatacattgactttaaattgaaccacatacagaaaagggctagcaggtggtgatgactgaacattatttatagtttaaaaaaatagagacagatgatggacagttgaaaaattcaaaggctgaggaatctaatcataattatctcaaacacttaaagcaatctatggaaaaagaattagattcatcaatgtaacattataaagaagtaatactaggattaataactagaagatatgaggagtcatgttttgtcttaatggaaggaaaaactaagaaatgaagcattcccccaaatagagtttctcacacacacacacacaaatctgtagtgtttgtgttcaagaagaagctgggtcactatctgtcagaaacatttttaagtaatccttaaggaaaaaatgttgaactagagagtctctgaagttgcctccaacacaaaacattcctttttttttttttttttgagacggaatttgactctgtcacccaggctggagtgcaatggcacattctcggctcactataacctccgcctcccaggttcaagcaattctcctgcttcagcctcccgagtagctgggattacaggtgcacaccaccatgcctgactaatttttgtatttttagtggagactggctttcaccgtgttggctaggccagtcttgaactcctgacctcaagtaatccacccaccttggcctcccaaagtgccgggattacagacatgagccactgcacccggccaaaatgttcttaattccatgaatcataaaattatttcttctggattgttagatctattaaaatgtatggttcttttatttttcaagtaaattattatattgtataatctaccaatcggactagcctgacagtaaattaaacaagaattgtattgaagaagacacaaataaatgaaaagatatcccatgttcatggattggaataattaatattgttataatgttcatactatccaaagttatctttaatgttgttaaaatgtccatactgcccaaagcaatctacagattcaatgcaatccctatcaaaataccagtgacattcttcacagaaatagaaaaagaacaatcctacaattcatatgcagcaacaaaagaccctgaatagccaaagcaatcttgagcaaaaagagcaaagctggaggcatcataccacctgagttcaaaatatactacaaagctataataatcaaaacagtctgataccgacataaaaaacacacatagaccaatggaacagaatagagagccctaaaataaatgtacacatttatgctcaattgatttttgacaaaggtgccaagaacacacaatgaggaaacagcagtctcttcaataaacagtgctggaaaaactgtatatcctcatgcagaataatgaacttgatccctaacatcataaatctcactactaaatatatatccaaagaaaatgaaattcatattttgaagagatatcagcacgcccatgttcattgcagcattattcacaatagccaagatatggaatcagcctaagtgtacatcagtggatgaagagataaagaaaatgtgacacatatacacaatgaaatagtgtgaagccctataaaagaaggaaattctgtcatttgtgactgtattggtgaatctggaggacgttgtgttaaatgaaataagccaggcacagaaagacaaacaccacatgatttcatttatatttgaaatctgaaagtgttaaactcatagagttagagaaaagaatggtggttattatcagtggttggggtcgggggttggaaagatgttggccaaatgatacaaaatttcagttagaaggaataaattcaagaaatctattgtacaacatggtgactatagttaataatattgtattgtattttgaaaatggctgagtagatttttaatgttcttactacaaaaaatatgtgagatgatacatatgttaattagcttagttgagccattcaacaatgtatgcgtatttcagaacatcatgttgtacccaataaatatatacaagttttttcaattagaaaatttaaattacactttaaggaaatacggatggtatattcttgccagaacaagtaacttttaagaaaatttagccttcattttctgatgtgcaagatctaaatgactagatttctttgaatgatattgattcgttcaaatataatattgaatattatttttatttccattttggtttcagttatattttttaacctggagtgctcaatttgtaaattctgcattcctcctggtgcctacttattaacagacattgttaactgcattacatccgtttttctattaagtgttttttcagttgtgtctgtgtgtttgcaaacatctagattaaaaaaatagatgtttctaagtgtctcaaaatgttaaataaggtgacttttaagtttttcattctgatgttacagttcttggaacaaagctcaaaagctatattcaggtaagatatgagtatacatatacacgatttaacagtaacacttatttgaattagtagtcatttatggcagctattaactttctatgtgactagtagaaaagtaagatctgattttttatcaatgtagtttattattatagaaaaaattattcacatttcatataagcactaggatttctactatacacaatatttgtattcctgaaaaattaaaaaaaaacttttttgtgcaaaattatatggtaaaaataacaagactcttgggggaaatagagctggggagaccacacacaacttatgcaattttataaccagaacactcacaaaaatgaatattggtaccttggacactggcaggcagcaactcagcatgcctggagctgcttcacagaatattaaaaatgcacagagtaagtaaaatggaaacacaggcagtgaggcaacgcaaatggaagaggagctctgatcagctgggctgcttaaaggtgagaacaggaggaaatgcaactgccaaggtcagtgtgtgtgtttttctggaaggaggccctgaatgaagcgttcatttttaattttttaaggtcagtgtgtgtgtttttctggaaggaggccctgaatgaagcattcatttttaatttttttaaaaatggagctttctgttgggaggccaaggagggtggatcacgaggtcaggagatcgagaccatccaggccaacatggtgaaaccccgtctctactaaaaatacaacaaattagccaggcgtggtggtgggcacctgtagtcccagctactcaggaggctgaggcaggagaatggcatgaacacgggaggcggagcttgcagcagtgaggtgagatcgcaccactgtactccagcctgggtgacagagcgagactctgtctcaaaaaaaaaaaaaaaaaaaaaaaagaaaataataataataatagagctttctgaaagtgtttctacttcttctatagatgagctgagggaattttttcctttctgctaaagtttatgattctcatttcactatttctttctcctattgcctaacaaaactgcatctgaatcagtacaacctccacatggtgagctaattgatgttatagaaacttgtgtttcgacacagtgtttctgaagcttttgcatatacaagaattgcctgaaaggcttttaaagaacagatttccaggtcccatttctgacaaacttccagacgaggcagataccactggtggcacaggtcaccttttaagtggcgaggctgttacagtgcagatgtgtaatattctctcttccttcgctggtgaatttcaacattgatggaaattgtattggatactggatccatactttcagaaaatgaagtgagaacatctcaccaatacatttttggtgaagtttttactgcttccatatgattcagccttccacgcagttcagaagagtgacagacactgattcacaatgatgcagaattatcaacattacttcaatcgggttatcctttgtaaatttaattaattattaggtatatgagaaaacaacaatttgaagaaataggcatacgtactgggatattcctactacctactaccaaatcaaacattttctacatagacaccaaagctttcagggaaacgtacctggttttagaaagcccaacttagtttgggtgccaaatatgtttgcttgcctggttttattttcctagaattgtgaaagaattacttctgatagaaaaaagttttcattatgattttcagagacagactttaaagaatagctcatactgtttctgttacatccattttatcttacaaaaactgctgcatgtaccagatgattttgtctgtctgggtttccattgtctagtttggaaatgaagaggttgggtggatgattgctcaaatctatttcaattacaatatctatgggtctgaaatctgtaagatggcttagcatgtatcattcaacaacacaggccaatggcttttatttctcaaacaattttctggaaaaattaaatgaataacttttttcatcttctcaggctctctctcctttccatgcactatcaatgctactgaagaaaaggatgtttttaatggttatgaaggatttttaaaagagtaaataataaggatttgtaatactcagtgcattatccttaagaaatgtaatacctaattaaaaagacaagaaatatagaagatttaaggttaatacacaacagcagggggctatgtttcaaactgagtagtagagacaaatagcaaatagaagagtggcctctggagtacaataggcacctcttcaatacagaacacattcattcattcatccaataattgtttattgatttactatttggtggcaggcactctgctagatgttaaaatacaatgttgaggggctggcagtgagcctatggaagagacagagaaagagtatgtgactacatggatagaaagaaaaccaagagtgtgtgatgtagcagtggagggaagacagctattagaaaaggaaggaaacgttaacaatgtcaaaatgctcatcagagatcaagtaagataaaaactgataaacatgcattaggtattgtgacatggatgttaccagcaaacttatcaaaagttgtctccataaagtgataagaattggagccagacaggaatttgcttcagaggagtgttagaggaagaaatggtgttggtgattatacatatctcttttgagtaagctggccataaatgacggaagagaaagaacagtagttcaagggagatgtgtagttataggcattgagcatgtcttctttccatgggaagaatccagctgagatgaagatcttgattacataagagaaaaagataatagatggtctagtatagtgctttgaaactttcttacgcatgtgaatcagctgaggatcttgtttaaaatttctatcctgatttagtagatctgagataagacccaagattcttcatttctgttgagttcctaggtgataccgatgttgttggtctttaggtgacatttccagtaccaagagtgtagtagaattgctgagcaaggttatgggtccatttaaattgggtgaccatatatttttaatggattatatttgccctatcatgcagtatttttcctagcatctcttggttgcttggcagtaggcaaaaataaaacagaaagtaggagttgaagctgtatatagaaggaactgaataaagggatggatggatttggaaatgcaggtggtccagggtactggaggtcctgatgaagttgaaaagctgtcatagtggaagtgactgtaaagcaagttgggagaaaaggaactcatgaatgaggattttgaaagtgaaagaatttgagatgatgacaagatccaagatgcagccctgaaagtatatgtctgaaatagcagggaatggcaagagccttattgtcatttaacacccaagaaggaagagggcttatgaggatgggtcaattccagggcactcatggtcaaatgctgggtggtggaaattataatgagaaaagaagtttaagctctaaggtcatgtgggtactgacctgttgatctccttggaatttctcttagaattaacttttttatgtaacaagtatttattgagcacctactataagctaggcacttgtcttagtctgttttatgttgctataagagaatacccgaggctaagtaatctataaagaaaggaggtttatttagcttatgaatctgcaggctgcaatagttcaagagcatagcaccacatctggccagcttctggggaagggcacatgttgggtcaaaacacgatgtggaagcaggaaagtgggcaggtgtgcaaagagatcactgatagaggaagcaaaagttctggaagctgaactcacttttataacaactctctctccattaagtaatccagatgcatgagagtgagaactcacttgctcccataggaggatattaatttattcatgagtgatccaccctaatgaccggaacacctccaattaggccctatctcccaacacctccacactggggatcaaatttcaacatgaattttggaggggaaaactcaaaccatagcaacgctgttctagatactgtaggtaccctactgaacaaaacaaacagtgcttgcattctggtggattcatgcctccaaagtcctgatttctgtgtggatggtgttttaaaaagaggccgggtgtggtggctcatgcttgtaatcccagcactttgagaggccgaggcgggtggatcacaaggtcaggagtttgagaccagcctgaccaacatggtgaaactccgtctctgctgaaaatacaaaaaattagccaggtgttgtggcgggcacctataatcccagctactcaggaggctgaggcagaagaattgcttgaacccaggaggcggaggttgcagtgagccgagatggcatcactgcactccagccagggcgacagagcgagactctgcctcaaaaaaaaaaaaaaaaagaatcgcaaacttgctgtccccagtgctcctcaccaaattgaaacaatatacctgggatgagaagataactttcatcattgaatttttcttgttatgaaactttgagtttaactttattcatcactggagcaaagaaaattagttcgtgggaaaaagagcaaagaaagtcacttgaccagctttgaagaaggcttcttttgttgatgcagtccaaaaccaaaggaacccttttatctgatattactgagagttacctgaagatgtgggatggggacttgtatacaatgttaggcttgaaaataacaaaaggtagcaactcaagatcagagattacatgatttttgagaatgtaggactaagagcattgcctatcaatggatgggtaacataaaagaagaaaagtcaacaattgtatcactattgactttgtctacctgttattaagcttttcttactctaagtgaatatcataagacaaagtaataatataaatgaattcatcataaatattttgacttaattttcagcagtatatgctgcatagaaaaatcatgtatatggtgtctcataacctgggtttgctcccttattgtaccattgctcaattatgttctctattgcttctacctgtagaatgatttctattctgactttgtttgcatttccctaaaatctccccctgacatgttattagtaaaagctgttcacctcactggacagggccacagatcagttacataaaacaaaggaaaaatttctcttttcttttgataaatgcatattaggttttggcattaattctgggccccaaaacgtaatgaaaagcccagccattccgtttgagttttgatgaatagaagacatgctctttacctttgaaatctgactacagaatcatactacactccaaaacattcatattcctccaaaatttctcggaaatttttgcacaaagcctcctcctttctttcctggatcgtttctgagactttgatcctttgctatttggtttgtccttatcagtgagagcattggtactaacgtgaatggtgaaaatgagatcagcaccgtacaggtagaattgaaatattatgataaattatgagatagaggaagccagtttaggaaaacagattttccaagcttataactcactccagccttatgagataataaatttaggagtgttcctcaaccttcttttgaatttgtgtaagctgatgataaaccacaatatttctgttgcaagggaaaaggaccacaaaacatctttggccaccaaagagctcagctcttacaaaatattttgatgagataagtgtaaatgaatcagaaaacatacaggttgaatttccaccattatactcatgggaagataggaggcccttttgtctttttctttttctttttaaatgagaacaagaatgcagttgacaaacatggtttaggttttctgaatcaaatattttgaaaccagttcaagagatttttttgaatctgaatgaacaaaaggttgtttgcccatttctcattttatcatttgttttggttttcttggcctttatttgtccaggtgcccaaaggagagagagaataaacttgaacattctgactttgaaggtaagcatctattaatggcaaaaacctccattacttttgcaccaacctaatatttttggaacttccttaataaaattcagctgttgcagaggtagctatatatttatctcaagaggaaaattttttcactgaaaataccatcagcatttccattttaatgacattagatggccagataggtttgacagaaaattgcctttagggctgtctttgggccaaagtttggctttttaaaaattgctaatcatctttcacttttagcctttcttcattgttcaatgcgctaccctaccagatggccaatgccctgagcttttacactttcttctaacttcccaacaattttccagtggaacatcccatggatatggctaggccctcattatcaaagcttattttttttagtactaattccatatcatccaaatagtatatgttaattttgtttttaaaatttctctgaactgtgttcaagtcttttatagctggggtactcctaattaaatttatatgttatcaacatgtatatgccgataaaacatacaaattattacagcagatgtggggtttccaaaggtctggccagtcaccatgttcttctacaatgataaattacattcatggcctcaattctcctctctttgaatatctgactctagccatgtgactttgaagttttcccattaaagaagtggactgcgttttcctaaaacttgactttaagtttgtctgtggaattgctttgaccaagagaatattagtaaatgttaaatgacaaaagatttaaaatgtttgctcacttatatgtcttctatcatgatgagaagaacatgaccaggctagcccaggagaaagatggagcacatatggagcagagctgccccagccaacctgctcttgagaccccagcttagagcatccaactcccagctaacacccagaagcatgagtgactccatttaaggtcaataaaaccatctagccgagtccagtgagataagccagcccttggttgatcacagatgcatgagctaaataaatgcttattgttgtatgccactatttgggtttttgtttgttgtgcagcattactgtggatgtggttaatgtatacaccctcctatatctttctctttggcagctacagagggggttcctctgagcacagtttaaaaaaatccatatctgtaaattctcagtcataacattagtttttaaacagatttagttgtcaagaaagactttgaaaagtagcggtatcaaaacatcatattgtactccataaatgtgtatgattattgtcaattaaaaccaaaataaaactttcttaaaaaataatgggaacataaaacacccggcaaaagcctcaaaactaacattttggttagataatttttatgtgtttctctaaattttcaaggtaacttaaagttatacattacttcttgtatcctttgtaacaaccctgcaaggtagatcaagtattactacctcattaactgagcaccttccatgtgctcagcactgttatgaatgctttgcatatattaacatgtttattttcgcagctatcctatgggatagaacacattgattatttcctcatttatggatgccaaaactcatttgagctttataccaattctattatttgagtaagtaaaatattattatgctcttttactttcttattatgctctttactaagagcataataatatttttattatactatattaataataatattttattaacagcataattttactttgtaggatctttacatgtattatcttatttaattttcacattgatcaaagaactagggattctacataaatagccctattttacagatgagaaaacagagtcaaacatgttaaatatcttgcccaagttcacacagctgttacagccatgctgaaaagtctatagctcaaagactgtatacaacttggccctaggtcgaccaattaccatgccagggagccaaggctagtgtagtctttctgttagtcaattttatcctcaatgctctgctcagagggagcgtaatgctggatctgagttgcttcctttgcaacaccaacaaaaataaattccaaagtcaattatttagttcaaaaaggtgctataaagtcattatgtgaaaaagatacttgtaacacacatgtttatagcagtacaattcgcaattgcaaaaatgtggaaccagcccaaacgcccgtcaatcaacaaatggttaaagaaaccgtggtatgtatatatgatggaatactactcagccataaaaaggagtgaattaatggcgttcacagcaacctggatgggattggagactattattctaagtgaagtaactaaggaatggaaaaccaaatatcatttgttatcactcataagtgggggctaagctatgaggatgcaaaggcatacgaatgatacaatggactttggggactcgggggaaaggatgggaagggggcgagggataaaagactacaaattgggttcagtgtatgctgcttggctgatggatgcaccaaagtcttacaaatcacccctaaagaacttacttatgtaaccaaataccacctgttccccaaaaacctatggaaataaaatttttttaaaaaaatacacatgaacacaaaacgtatcataataatcatattaagtatacaatacaatggcatttagtaggttcacaatgttatgtaaccaaccccactgtctagttccagaccattttcgtaaccacaggaggaaactgtatctattaagcaggtaccttccacttccccctgccgctcagaccctgtcaccacaaatccattttctttctctatagatctgcctcttccgaatatttcattaaaatgggttaataccaaaaaaaaaggtgttatagctgacaatctgtgctgtgggccggctctttctgcaccaggtactaaaaaacaggaggcttcaaaatcctattccatagcagttttccaatttcacagtggatcgaggtgtcatctcagaaggacattaacaatacttaaaagcaatacttaataatgggtgcatcccaaatgttcattatagttcactgtgaaccacattttcctcataaatgttctgttatttaattccaaaatcagaacaccaatagtttcttctatgtaatcccacattcaaacattattttttttcttgcttttaggactagttattaagattaaacatcctaaatttgctatttttcttttttcctcttcaagcccccaaattgtgtctgtgatgtaaactaagagaatactgctgaaatatgacactcaggcttcctgatacattgttggttagacccgaaggcctatgttaagattaacggtcagttaggagtttaagaaataatttagctagtaaccttgatgcgaagaaaggcatgaattaggcagcaaaggtctgaattaaacagaatgtcacagaaactggaagatagaaatgtggacagcttgccttaggaattatggatgcaaaattcattggtgcattctgattagttaaagataattgagggtgataattgactacagagagatctttttaaaaatgtatcagcaagtatgcatttggggtgattaggtaagaatctagataattaccatgcaacttgtgaaactcataacagccttgtaattattcgttaaacaagatgttatatgcttaaagaagcaaagtattttattagttagaacatggcctgtactaagtaggttttaatacactaggggtcagactctgatgcttggggaaattacaaaaacataataatccttgtgaatgaatgaatgaatgaacacatgatcctgggtatgcctaaataagaatttgaatgagagccaatatggaatatcatggatgattcttatgtaaggaggctgtatctttagctttgattttagaaatgagatagaagtgagaagtccaaaggttctcaagcttaagtagaatctttgcaacctgttttcgaaggcaaatccaatatgagaggaagacgttgcccaaaatgatctaatggatttagaacatgtgtatagggtgacttgcccaggcgggatggaatcaaggatggatctaagagttcttggtgtaacagaagagcaaagatttaggagttgcaccaagtttgagtcctggctctgtttcttaccagttgtgtgaccttggcaggttactggacttctctgagcttcagtttcatgaaccaaagagtgtaattataattgcctgagtcagaacaactgaaataatgtacataaaattgcaaactgtgagggtgactctccaagtattaatcctgttcttcatttgctttttctcttattactggggactgtgtcttaatcagaattgtatttccttttaaaatcaacttctgtccttgatccttaataaaaggttcaataaatgctcatttttgaatgaagaagccaatgaaaacactaaaaatgagtttgaaagtgatctctaatgtgtgactcaaggcatcggtaaaattagctaggaacacactatgcaatttagaaaacctggttgacttttataaaattacttttcattgtgattttaaaaatacataacataaaatgtaccattttaaccatttttaaaggtacagttcagtggcattaaatacattcacattgttgtgcaaccattaccatcattcatctctagaaccttttttcatcttgaaaaattgaaattctgtactcattaagcaataacttctcatttctgtcttcacattcagaccctggaaatctactttttgtctctatgaatttgtactctatacctcgtatgagtggaagaatgcagtatttgtccctttgtgaccaacttatttcacttaacatatcttcaagattaatatatgttgtagcatgtatcagaatttcctttctttttaaggccaaataatattctatggcatgtgcataccatattttgttcattcatctaactgtgggcacttgagttgcttccttccatcttcagttattgtgaataatgctactataaacataagcgtgcaaatatttctttgagggttttctttcagttcttttgggtatgtaaccaagagtggaattactgaatcatgtggtgattctatgtttagtttttttaaggaaccatcgtactgtttttcctaatggtagcaccattttgcattcccacccacagtttgcaaggcttccaatttctctatatccttaccaacaatcgttattgtctgtttttgcttttatgtatttatttttttatttttattatagccatcctaatgggtgggcaatgatatctcattgtgattttggtttgaatttccctaataattagtaatgttgagcatctttggatgtggatattggccatttgcatatgtctttcaggttcacttttcaaacttcagcaatagaaattgcaccgtttttttctcttttccgcacctcttcctttatcccccagagaaagcaacattcacctgctttcaagattactcctaatatgtggaatgtactacccagaactaccaaagagtctctgtctttgttatgctgcgccgacatgtgaaagctcatgcagttggctgccaagatgttggtacaaatacacagtcaactacagctccaaatctacatggctctaccaagctatgttgtaccatgagcagctccttcaaaggatcctgattctataactccctcaaactaatatcggtatgcagactttcacatttgctttctatctttgtagttaaaactcaatattttggcctaaggtgatctctttttagtgaagcccagaaaaacatttaatgaaggatagcactcccttaggtatgtgaatttttttcctcatgaggacaatgtacaacttaaaaaaaatacactaaaacaatgcactcaaaatgtagcatatgagagatttaagctcgatatgagaaatgtctttcatccagcaaatgttaaatactaaaacaagttgtggagaattgttatagaccattttcctcaaaaaagagtaagtctctttaaaatttattaaatgtggaatttctattgccctttaaacaatggtctgtaataattctgacccatgtttgagaatgtgtccctaatgtacaaaatagaaccctgctagacatttgctaacacggaaaagggcatataattttgtaaacaaaaatcccataactcaaatttaaatatggcaattattttaaatctggctaaaaataattaaactatgatacaaaataatttatagtttagaagtattatgttttagaagtattacgtctgtaaaaataagctcaggaaagacatctggtactactttgtacacttttgactccaatttctctgctgtgaatctattttgagtgtcacgttgtcttcgtgagcttactttatgatcttttattcccaagattttattcaaagcatcctcttcctcagtgttttcttacgtggcattcccataaactttttcttttaaattaagtagtcatttatcattgagaatatatattctcaattgcatcttgcctttattgattcaaaaaagcatgtatcattattggaatttaacctatcaagtacgttcagcaaagacatgctaaagtggtttagttcctttgatgtatagcaaatcacttttatagtaatctaacagttggttcttcaaatgtttagctaaatttctctgtgtgtgccaaaagaaccttttgacaaaaaaaaaaaaaagaaaagctttctatgtattatcttagctgtttttaacactgttgggaacaacacagttgttcccatggaatatggctgtttagtcatttgctagtaaatggggcctctaaacattcattatcaagttcagtgagattttgtacaatttactgtgcattgtatgactttagaaatggtgagaaaattgtaggtttgttttcttgttccagatgcttttcactctgtcatatgtgtgtgtgtgtgtgtgtgtgtgtgtgtgtatacacacagatgtagtcatgtattgcgtaatgacgtcttggtcgaaaatagaccacatatgtaacagtggttttctaagattataatggagctaccctatacaggtgtaccagatttctttctttctttctttctttttttttttttttgagacagagtctcactctgtcacctgggctggagtgcagtggcaccatctcagctcactgcaacctctgcttcatgggttcaagcgattctcctgcctcagcctcctgaatagctgggaccacaggcgcccgccactacacccagctaattttttgtagttttagtagagacggggtttcaccatgttggccaggctggtctccaactcctgacctcgtgatccgcccgcctcagcctcccaaagtgctgggattacaggtgtgagccaccacgcccggccaggtttcttttatattgtatttttactgtaccttttctatgtttagacatagaatgtcttctagacattctagaaatagaatggaatgtcattctagaaatgtcagaattctagatagaatgtttagacacataaatacttaccattgtgttttcattgttgatgctattcactaaagtaacaggcctaagaagtttgtagcctaggagtaataggccttactatatagcataggtgtgtagtagactatacagtctaggtttgtgtaagcatactctatgatattcgcatgaatagtaaagtcagctaacaatgcatatctcagaacatatccccatcgctaagtgactcatgactgtatatatgtatcagtacacacatacatacatacatgcatattcagatacatgctattatttagctatgtcacatgcctacataaccatagtgagaggtttattgttaatgatagtagatgggaacccatgttacaactagtcttgataattttagatgatctaaaccattagatcatcagtgcttttgcccttcttagaataatgataaaagctgtttttttaaagcattaactatacactatgggctttgctcatttaatttgcccaacaaaccattgctgtaaggatgagaacttcatattacattcttatgtgacaaggggaaactggtacacagtgaaattacgtaacttgcccaaagtcactttaacatattgcagtgtcaggaatgcgaggccaggcagtttggcttcagaattgcattcttatcccatgctgtcctgttttggctctgttttttgttgttgttgtttttcttttcttgtgtttgcattagcaatgcattttcaagccatggtttctttgcatggattgtatgagctactagtccattttgtgaagattagtttagttaaaactagataagagaattcataactagaagcaagtaaattgtgataaattgcaataagataaaagaaaacatgaggataaggttgccacggtcagccttcttccagttctgcagaacacttcccctttctgtaggaaacctcactttttctagctgagcacagccctttctgattcaagaaatcactgcgtatgcctgtctacactaatgctaagacttagtaaaatgtagtttccttatttttaggttaaaaataaatacaaatagaagttctaatatgttctttctatacccacaatgaattgtcttggaaatctggagtataagtagcccacttgggagaccactgcaatactgtaagatgaaaatttaattgaggctagagaacagataatcatttagccctgggctgaatttttagggaagagacaaaataaaaaagaataaaagaggtcaactaagattaacattttaaaatctccagttgccatagaaacagaaaatgcaggcaagcagtttagctacccaagacttttgaaggataaagtgtcactaaatgtcaaaaactattatcaggcttaactggaattggcttttgagcctcagcctgtggttatacaacactcatccttcaaataccctttctgcaagtggtggctgacatttgaacctgtgagaaattcagcctcctctgtcctggaaaaactcaaaggctcagtaactttttgaaggagccactctttgctggtagtgaaagacttatgcatagaatgacataaggccaaattgtttatttaaaagctcactgttaacctctacatttttccactagtgagccccgtctgctttttggatatggaaatagcagataattttattgacccaaacattcactctcatcttatattaacagctgagagagttgaggagcgttcagagacttacagtgtctcggtgtaatgaatgtcttatgttactgggtctgagccaatatacccactaccttataatttttttctctgattactttgcttcaggccctttgtatgctactaacaactactagatttcactgtctgctccaatgtgatgtttcaaaaatttctggaggccactctggcttactctttcaagtaaatctctactttcataatttataactgtctgtagaacttctggtcttactgatgacccactgcactgctgtcttaccagggaatcgggtgctaacaaccgtctagagactagttggagagaagttcaatgatgtttggacaccctcttagggtagcccttggtaagtccaggtgactttcccactccattccattgcaactttcattcctaattaactccatttggaattgtgaaacctctttttccttattcttctttttcttcttctctgttattcatggacatctgctgcataatcagctgatagaactgagccctgtgaggtgtttgtttttattttgttttgttattttattttgttttgtatttttttcatagtcaagtactggactatcagtatcaggagagtcatggaaatgtaatagggattgggagaaagcctaaaatcacaaggtaataagattaatttcaattatttacatataaatcatcagctttgatcctctgtaagaatagtccataaactctggagcaaatgaatgatacactacattttaaagagagtttggtttatacacatattttatggaccacgtctaatatttaactaggtgagagcctgaatattgtacattacctgtgtcaacaaataactgcaaagagtctgcaatgaatatcttaattgggtaaagactcaagtgcctggagcataaccaacaccatgctaaaagaagtgaagtctcaggctgggtgcggtggctcacacctgtaatcccagcactttgggaggccaagacaggcggatcatgagatcagaagatcgagaccatcctggctaaaacagtgaaaccccgtctctactaaaaacacaaaaaattagctgggtgtggtggcacgcacctgtagtcccagctacttgggaggctgaggcaggagaatcacttgaacccaggaggcagaggttgcagtgagccaagatcacaccactgcactccagcctgggtgacaaagcaagagcaagactccatctcaaaaaaaaaaaaaaaaaaaaaaaaaaaaaaaaaaaaaaaaaaagaagtctctgctattgaaaattgaaagataataatgttctttgaattattcaaatgcatccttaccagtgaattcaaagcatttctatgttgggaccaatgttgttaacaataataataataataatagcacaatgactattagtaatcacataaactgatcattaaacaatttaaatgcattcttatttaactctcctgacaatcttatgaagttgatgccattacgtccccattttaaagatgagaagaggaattagatcattcactgcaaggtagcacagctggaaaccatcagaggagttttaaactaaggccactggctccaaagcctaagatctttgctactctgctctactgcctcttattctcaactggcctctgatgggaaaccagaaaggcatagttgccctctgctaatgggaaaactgagcttaaaggggcaaatactaattcgttccaaatcaccacaatttgtggaaagcctgggttaatatgcaattagaaaaagccagtgtctaaaggacaagaattttctgtatggttcttacaacctaaaaatggtaactaatatctttttaggactaattatgtgtcaggcactatatattaagtgccttaacctcaaactctcttaatattctcaacaacctaatgaagtaggtcctattattaaactcattccacagacaagaaaactgaggcacagggagaggaagtaacttgcccaagatcacactgctagcaagtaaggggactttgttccagagtctgtgtgccactgtacccaactctcttacctttccacttgtaccttaatcactgagtaccaaacctcctggtgaaacttcagggcttcaaagtcccttatcttcgaatgatacagaccaaataaataatgcatgagatcagctaataagagatcatggaaatactgagtagcagacaaaattgaagacaaaattagtaattttatcatgagaatatgacctaatctggagctacatatggttcagattgaattccaaattcatggaaatttgacaaatttttcttttctttttcttccttttttttctttcattgtgcagtctatgttggcaagacaaatattactcactttgtgtgtatctgtttgatactattccctctcttttgttctttcatgccaaatttataatagaacactgcaggtactcaggcaatttttgaaataatttcaagtagaattctgaagtgagcatggaaaagaccactgtatgtacatcctgatgaacagggaagagaccaccatatgttcatcctgatgcaaaaaaaaatttactattttaacaacattggatcatctaagctggaaacactgggtggctgagactatgcaatagacttggctgatgtaacaataacaagccaggtcacaacagctccatgctttccaaccttctgggatgactcattttgtccatatggttatctaactgacccagcaccatttaatgaaatggctacctttccccctcttcactgcagtgctgccttgtcataaatcaggaagcatacatgagttggtctatatcaatgccattctgtatcattagtcattttgtctatttgtgtgccaatatgacattgtcttaattactgtggttttataataggccttttgagtgtttattttctttacttttatagctttgttcaaatggccaagatctctgtttcaacattgaacataaatagtaatagtctttgcctcatttttgttgttggggaaaattttccatattttaccattaaatatgaggggttttctttttgtagatgtgcttatcagtttaaacaagctttctgctattcatgattttataagtttttaaaaccataaacaggtgttaaattttgtcacattttttctgcattcattaagatgattgcatgattttctactgtgttgtaaattacattaagtttttgtaagtaaattactttaagttttgaatattactgttaagtaaatcacattaagttttgaatattaatacactcttggctacatgaaataagccttgtttaaatggtgtattactcattttacatattaccgaattcacttttccaatttttaaaaaaaattttgcctctaagtttatgagtaagattagtctgtagtatttctttttaaaattttcttttcagggtatggaatcaagttttgtcccaagctctcagaaaggagttaggaagtacttcctttattccccttagtttctaaaaaaagtttgtataagattggtctattttattcataaatgtatgtatgaattcactagtgaatcattccagatctgggtcattctcataggaaggtcttataattacatatttaattcagatttttaaatttcttcctttgtcaggtttcataggttgtgatttttttttaatttttaaattttactttactggaaatttcactggcataaagtcattcacaattatcctgttattatttttaaaagatctgttgcatctgtagtgatgtcccttttcacgttactgatattggtagctcatgttttgtattttccatgtgatctttatggttttaacctacttttgcctaggagtgtgtctctgtgtgtgtgtgtgtgtgtgcgtgtgtgtgtcagagataaagagagagagagacagagagacagagacagaaagagggagagagtaaaagaacggtaccctgctttgggtttactgaatttataagtctgcaatttattccttttcatcagtccaaaaaatatttgcattatttctttgaatacttcactggtccatttctaccctttcctggaaatccaaatacaatatgttacaattgaatgtctcccatatgaattttcttctcttttgttgttgttgtttctatgctttaccccctccattcttcagcttgaatgtttttctattggtttgtctttgagttcactaatcttttttgttttgcattgcctagattgttctaatggattccttgtttcagataattgcatttttcatttctaggaggtatatttgatgcttatagcttcaagttgtttattacattatgcatcttttcattcatttctttattttaaccatcctttcctctgttttaccatagctataattgttattttaatatttttatttacaaatttcactatctggataaactgaggttctacttctcttgcttaatttttcttttgactatgaggtaaattatcttgtttcttggttttttaaatttaaattttatgacagattttaaaaatctataaataatgactataatgtcatttttccccaaggggaattgttctttcttttcttgggaagataatatgaggggaaggtttttttatttcatttattttattttattttatttgagacagggcctcactctttcacccaggctggagtgcagtggtgtgatcttggctcactgcaacctccgcctcccaggctcaagcgatcctcccacctcagcctcctgagtagctgggactacaggcatgcactaccatgcctggctagttttttgtatttttagtggagacagggtcttgccatgctgcccaagctggtgtcaatctcctgagctcaagcaatctgcctgtttcggcctcccaaagtgccgggattacaggcataagccacagtggctggccaggtcatttaaatctaatcagtaattgagcttggtcagaactggattgtagttttagatagattcagcccacctctgctatatcgctgatcttctgattgtgatcttggtagatgtgtgtctcctcagaccttaaacccttcaattcaatttttctgagtttgagcttaactatttagcctccagccccatgtagcttcaatatctgtcaaacatcttgaggaagagatgagccatggtttaaaacaggaccttttatcctaagtaccaagaaattgagcaaaattttactctccctttcagccccatcctttttgactgtggctttaccagggttttgatgaaaagtctaatgagtctctacttcttcagtaatataatgtgtatcttttggatcctttaaattaagccctttaaccttccacccaaacaggttcataaccttgcaaatctgttgtatttatagaaggattttgtcacctaagcaccctgaacagataaacaccccacttcctatactgcctcagcactcagcaaatgtcctttggggtcatgtgtctgcgctctttcagatctctatctaccattcggaagttttcagaagcattattcgtcttggttttctgcagtggaattcctccacctgtgccaagcctgagcctcagcttttgcccaaacttgcaaatgccctcacagaagaaacaactattgattgccagccctcttaggaagggctcttctctgtttggaattttactgcatctagttctcattgcttccatagttttctgatgactttaacaatataattttctaatttatccttttttctccctagttgttttagtaggagcgaatatttgccaaacatactatatcctacttgaaaggcaaactttgtgaaaattattatttagaacagttttgtttctaattaattattaataatgcatatacatttttaggcttattgtgatattgagaaaaactccatcatgttttctttcacatattgaactctattatttggaaggactttatattgcctattatctggctctattcctgttaaacctctgctctcattcttcgtgtgatgacattgtgtagtcagtagagatgactgtagaaattttcctggaacctattcttatgtagggatgtctagcaataatttaggcatacatggacatgactgaattatctacatagcccccaaacccacagctcagattttttgtattttgattttaacttcttatttgaattaccaaaatgtctatggccacttaacaactgatatgaagagaaatcagagtggatagacacagtggcctaaactgtttatagtcacaatatattaattttataaaatttatgaaaacatgaccatgtgaccatattactagggaccttgattacagaaaagacccagacaaataagaggccctgaaatgcaaacttcttttgcttcacagaaaattcaccatcattaataacatatgcacacacaattaccaccatcacaataaataaacaagcacaaccaaaccaaaaccaataatagaaccaagttggctgatcctgacaagtcggtttcagctaagctaacttgctcccaagtttgataaaacttccgagaaggataaaacttaagagatattatatttgcttaaatattcaaggaaaatggacacttttagaacaagaaagacattatttctggaaccagaaagcctaggtttaaatcccagcaacacaatatactagcttcatgactctgggcaagtttgtcagtctctctatgccttagtgtcctcatctatgaaatggagacgtgtgtatatacatatgtgtgtgtatgtgtgtgtgtatccatttatatatgtgtgtatatattacatataacattgtattaggtttctctagagggacagaattaatagaagatatatatatacatatatggactaaactctgattttttttatcttgcccaaattcctttctaagaggtctggggagtcaggccctacaaaccataaattctcatcagatgggttttatttaaccctatatatcatgacttattttccaacctgactctggcataacattatcagacaaggaagaaaatcaaaatatcttaccccaaaacatgtttctttgccctattttgcccctgcaaagctgttctttgtgggagaaaatctgcatttgtaaagaatctctattaatatagctagatctttttctcccaggttcttccaatcctaaaaagattaagaacttaacaggaaacatttgtcatctattgtctctaagggcagccactataagacttcaaaaaaactctggaccaggcgcggtggctcacgcctgtaatcctagcactttgggaggccgaaggggggcagatcatgaggtcaggagatcgagaccaacctggctaacacgaggaaaccccatctctactaaaaatacaaaaaatttagccaggcatggtggtgggcgcctgtagtcccagctactcgggaggctgaggtaggagaatggcgtgaacctgggaggcggagcttgcagtgagccgagattgcgccactgcactccagcctgggcaacagagctagactctgtttcaaaaaaaaaaaaaagaagactctggcctccacaatctttatcttaacctgaacattccctttctattaatcccggtctttagacaaactcaaccgattgtcaaccagaaaatgtttaaattcacctacagcctggaacaccgcccaccccacccccaccacgccccccgcccactccccactttgagttgtcccgcctttctggaccaaaccaatgtatttcttaaatgtatttgattgatgtctcaagccgctctaaaatgtataaaaccaagctgcgcctggaccaccttgggcacatgttctcaggacctcctgagggctgtgtcatgggccatggtcactcacatttggctcagaataaatctcttcaaatattttgcagagttccactctttttgtaaacatatgaaagggagtttattaaggagaatcgactcacatggtcacaaggtaaaatcccacaataggctgtctgcaagttgaggagcgagaaagccagtagtgtatcagtctgagtcccaaaacctcagaagtagggaagccgacagtgcagccttcattgtgtggccaatggcccgagagcccctgacaaaccactggtgtaagtccaggagtccaaaagctgaagaactcagagtctgatgtttgaggacaagaagcatccagcacaggagaaagatgaaggccggaagactgggcaaatctgctcttccatcttctcctgcctgctttatcctagcggcactggcagctgattagatggtgcccccccagattgggagtgggtctgcctctcccagtccacggactcaaatgttaatctcctttggcaatgccctcacagacacacccaggaataatactgtgcatccttcaatccaatcaagttgacactcaatattaaccatcaaaaacatgttatatgttatatattaatatgttatatataatatataggtatatattacatatttatatattggtgtaaatcatatagtgatatataggtaaatattatatattgatttatatatctattttatccatctatcatcaacacaccaaagtattatctaatatttataattattattatctggagttattcttgagtgaaacaaaatgatcatttttcttctgtagtagcattgcttacatgtttaacaggtaattcataaagtcaaaaatgtggttttagataaaaggcatgacactaaccttttatatattgtgacatgcatggtagtgtacatgaaaaggaagtaagttgagatgagacctatctttaaagatccaaatcaatctcttagagaaagcgacctgctagactattctgcaggcagcctctaggctctgggtttctgttcttcaagtgaacacaatatatctgtcactaaaagttaatcctttaagagtgagtaaaatggccgggtgcagtggctcacgcctgtaatcctagcactttgggaggccaaggtggatggattgcctgagctcaggagtgcgaaaccagcctgggcaacacagtgaaaccccacctctactaaaatacaaaagaaattagccaggcatggaggcatgcgtctgtagtcccagccactcgggaggctgaggcaggagaatcacttgagcctgggaggcagaggttgcagtgagccaagatcacaccactgtactccagcctgggtgacagagtgagactctgtctctccaaaacgaaaggaaaaaaaaaaaaaaggtgagtaaaatgatgatcctatttaaggaaaacgttattttaaagatgtaaaaagatggcaaaaactgaaagcttggcttgatggcttgcttggagctagtttacgacaacattggaaaggaattctataacaaatattaaatattattgcttagtttataaatgttttcttttttgtaattcattcacttagtttcttcagaattgtttttaatgttttctcaggaatataatttgtaacaacgctcagtgctattctcaacccatgctgctatttgttgatgggccaatttggtttgattgaatacatacatatgttatggtatgtcaaaattcttataaacttgctaatataggagacagataaattagtttgccagccaactagtttctaaatttgtctcattatctgtttccaattgcaaagtagaaacaaaaatgatatattttgaaaagtatgttgtttaatttaggaatatgtgtggcaatcttttagtcatacgtaaaaataaatagttatttcactaatgcaataggctatgagtaggaataactttcaaagacaaaaaattttttgtttgaactgtaatcctgagaaactgtatgaaagcttattttgtaaattgagtcattaaaatgtggaaacaagattggttaatctgcataattaccctacaatttaggtagctaggaaatcatctgattaccacacgctatgtacactaattcaatgtgtacatttttgctttttccactagactgtgagatttttgggagcagcgatcatgttttttttttttttttcatctttgaattctggttgccatttagaaaatgttcattgtaatgagctgtggataaagagggggtattgtggaaatgtcaaggtgaccttgaaattgttggtgggatgcaaacagatgtgtctctgctacaatggtgttctgaggtacaccatcatcaggaagacaggcagggttagaagaggacagctgtagaggacactgagtagacgaactagagaagcaggtggcaaatgtggagattgcaagggaagagagctccaggaggaagaagtggtcccctggaaagtgagggggtggttattgcagctctaaacactcttttgttggtttgttttttgtttttagatggagtttcgctctcgttgcccaggctggagtgcagtggcatggtctcggctcactgcaacctctacttcctgggttcaagtgattctcctgcctcagcctcccaagtagctgggattacaggcaagcaccactacaccaggctaattttgtatttttagtagagacagggtttcaccatgttggccaggctggtcttgaactcctgacctcaggtgatccgcccgcctggatctcccaaagtactgggattacaggtgtgagccaccacacctggccagctctaaacactcttttaaggacatttatcaatgaaagggagcagagataagaggcgtatggcagaagttgtgggtttcaaggagagtttattttgtcttggtaagataggattgcccatctttaaatgctattgaaaaggagccaacatatatggagaagttaacaacttggaagagaaatgaaataatcaagataaccaagcccatcagaaggatcaaaggttgggttttagaatgcaggttggggacagcacttcttcctttagaatggaatgaagagaatctgtccctggttagctcctaagcctagaaggaagtcaagagctcccgtgtgctggctattctgtgaaacaggaagatgtgtttacctgcatagtgttggggcaaatgacagggttaaaatgttgaagggcttaagagggtttaaatagttcctttggaaaatgaaggctgaataaagaaattcaagagagagctggacagcatcaggcatgccttgaggttaggggcttgaggttagaggttaggtgtttttaaggcatcaacctgtaagacagcataattttctctaagcagggaaaaaggtgacattttgacttatctgggtggctggaacagaaaacaaacaaacaaacaaaaaaagcaaaaacattaaacttagggaggtcaaggtactgacaaagaagtgtgaaaggaaaataaatattgggcccccaaaatcactcaagctgggaactgcttagggcaaacctgcctcccactctattcagagtcacacctctgctcactgagataaatgcatatctgattatgtatttggagcagctaatcagaggctcaaaagaatgcaaccatttgtctcttatctacctatgacctggaagcccctcctttaagctgtcctacctttttggactaaaccaatgtgtatgttacacatatcaattgatgtctcatgtctccgtaaaatgtattaacaccaagctgtgccccgaccacctttggcacatgtcatcaggacttcctgaggctgtgtcatgggtgtatgtcctcaaccttggcaaaataaacgttctaaattaaccgagacctgtctcagatttttggggttcacagaagtctctgggctggtgaacagtgagctgcatagggaaggaagtgaggaaggaggggcttatgggaataagtaaaggctcaaagggttggagattgtatgcaggggaagtacaggtaaagagaagcacccgagagggagctaaaactgtaggcgtccgtccaagaagtatcggtggcatttactgtaataaggatgacatttgactgtgggaacaaggagctaatgaagtgtgcagggaaaggggactggagtgctgagagtgtggaggaaccaagagggccgggcatcagaggtgtcatccctgtgcctattggagactcgcagagtgttggtaggaactgtgatggcaatgaagatggaaagccacatgccaaagtccttgatgaaggaagagtgggtactggggagtggattgatgaggacaacatggcagggcagaggagagtcaaatgcaggaacttcaaagggaaaagaggttttaccccaggcagataaactcatggatttggaagatctgcagaagaaattttacctctgggagaatcaggtcgtaatcaccacagtgaggcagagaaatatagagtagaaaggttaaagatgtaggagtttattttgctatgggattacccccatggaagaatggatttcatctaatcattcaggaaagatatttttggggggcttactattctagaaactgggtatacagaagtaaacaaaataagctaatttacagtatccataaagtttttacattctagttggagggagatagaggaaaatcacatagaatgatattcaaatacacagacatacctacctacaatcctcttgctgttttgctaattgtagcaaagtaatattgtatatatactgcatattcataaattgcacgttatcttactaacttggataaacttagtctttattagatgttaataggagttgcaaaagaagagaacttgcaaaaaaagagaactttgtcaaaaggatgtttggatttatatgtttagaataagagatggtggctgggcatggtggctcacacctgtaattccagcactttgggaggccaaggtgggagagttgcttgagcccaggagttcgagaccagaccgggcaacatagggagatctcatcgttacaaataagcaaaaagttagctgggtatagtggagcatgcctgtagtcccagaaactcaggaggctgaggtaggaggatggtttgagcccagaagttcaatgctgccgtgagccatgatggtgccactgcaatccaacctgggtgacagagtgagaccttgtctcaaaaaaaaaaaaaaaaaaaaagaaaaaaagaaaaagaaaagaaaaaccccaaacaaaaagaataagaataagaataagagatggctgacctgtacacaatatgtcaagtggtgtgttggccagtttttgcattactgtaaagaaatatctgagactgggtaatatatatagaaaagaggtttatttggcccatgcttctgcaggctgtacaggaagaatggtgccagcttctgcttctggtgaggcctcaggaagcttaccatcatggcagaaggaaaaggggaagttggtgtatcacacagccagagcaggaaaaggagagagggagcagggcccacacacttttaaacaaccagatctcatgtgaactcagagtgagaactcactcatcaccaagggggtggtgataatccattcataagagattcacccccatgatctgaacacctcccaccaggtcctacctccaacactggatactacattttatcatgagatttggaggggacaaatatccaaaccgcatcaggtagagatgagtttagtaaagaaacatccaggccgggtgcggtggctcacgcctgtaatcccagcactgtgggaggccaaggcaggtggatcgcaaggtcaggagttcaagaccagcctggccaacatggtgaaaccccatctctactaaaaatacaaaaattagccaggtgtggtggcgggcacctgtagtcccagcttctcgggaggctgaagcaggagaatcgcttgaacccaggaggcggaggttgcaatgagctgagatcacaccactgcactccagcctgggcgacagagcaagacactgtctcaaacaaacaaacaaaacatccagccgggtaaattgaaggcacaagattttgagagaaagtgaagaagttaaacttgctaaggagtggctttatgcactgggggaagagagggaacagatattgcaggtagcactaggaagagtctgtcaggcagaagacacaacacagagttgcagaggtggctttgagtgagtggtaatctgtggaagaggtgtctaatgacaggaaagtacagataatcctgcggacaagatgaggaaggctagataactagaaagccttcggtcttgagtattgatctaaaatggggaagtgaatatagtgaactgtaagattttttatattcaaaaatgctgcagccacaaaaaagaatgtcctttgcagggacatggatgaagctggaaaccatcatcctcagcaaactaacacaggaacagaaaaccaaataccgcatgttctcactcataagtgggagctaaacaacgagaacacatggacacagggaggggaacatcacacaccggggcccgtcggagggtaggaggaaaggggagggagagtattaggacaaatacttaatgcatgcggagcttaaaatctagatgatgggttgatgggtgcggcaaaccaccatgacacatgtatccctatgtaacaaacctgcatgttcagcacatgtatcccagaacttaaaggaaaaggaaaaaaaaaatgctggaagccattgccccaaatgctgagttctaagcagaaaacttgcaagttagaatcctgaggactccaaggttaaggcagcacatggatattcagttgccttctctctagactccagagtccctgcagaagtctggcaaagatagcctggtctgatcatcttcagaatctaaacacacctcatttacataactactcactgtaggttgttttcagttgccttctaagattgaaaatgctaaggcttccccaggtttcaatattacttggtcattttttttggtaagaatctgacaggtcagtagttagatgaccaaatgtttgaagaaagagttactgaaaggtgatatggttggattggtgctttaagttgaagactgtggacataatgggtagaataagaatccccgaataatggttgtgattgtgaaaatggaaagtagatgataaccttaaagaatttgtgaagttgaagaaagtggagcatttgctggaaagcacttcctcaaaatcttgcatctcaaaggagtactggttctgcctgacagaacagcattgacctccacctgaaagagcaggcctgactcagtgcgtctctggtccccacactgcagtcacagtgtggacattcttttgcagtgtgtggtagctcccccagggcagtgggcctgaagagacttgggggtaagtggtcaggattgcttcctgcaacagtgagaggtcctgactcatgggctctggatcccctctgactaatgatctgcaactgaccctctgcttgttctctagcaggtccattcaaggcaggaattgtaatttcctaggacacaatgctaggtgaaagggttcattgtgtcaccaagaatgacacagtaatttaagcctgggaatgcaatttattcaaactcctcatttcctaaatgagctcagattagaacaatctcttaaagaacaattttagaaatgttgatgtttttctttttcttttcttcttttttttttttttttttttacagggggtgggtgagtgagtaggatggaggtggccatggaaagaaaggagaggaggaggctttccataaccatgacttgaaatgaccgagtcagaaggttatggctgttaggaggagttaggaccaagaaacatgcactttctgccagtggggtccaaagtattctgcatatctcagacaagtgcaaacctgccttgcctttctctctgtctccctaggaggtactgtttgtgtgacaaagagagttgtcagtaatccagcagacaccctcttgtactgcattgaaatccagcacattcctccctacagtaggaaggacagactgggcttgctttggggtttattaaccatcttgaactattttccaaatgttttaggttcgaaaaaacctgaatcacattgggccacagccactttttcttcttcgctattaagcctatgtgtattttatgggaaatgtaatccatatgtttctgattcctttacacttaactcatcaagcaggatttgttaaagctatttcatgccctggatgccttttgagccgtttccttgtgactttcaaagccttttattctccagaaataggaagttacattttatgaaatgtaaatgagcttgaacccccaaaggtcttatttgggtcagaatttggaacacttgggatcagtaagaagcatgctctattccactctttcagaggaatttcagctcagggaatacttttacacttttcaatgcataaaattggctaaactttaattaagatgtacttgggagaaaaaaaaagcaaaaaaaaaatttcattgtaagagcacatatcattaatgaaaaggggtaaatatttctgaataaataaaagctacctcagctaaattaccataaaataaaataaaccgaaacaaccaaatacgtctccgaacatcactaactatgatcctgttgctaaattgctgttttaattttgtggccctaaagtgaatctccagtaaatattttttcaatacctcccaccagaacaattaaaataattttccaggagcaaagctgttttcatgtcttggcaaaatatcctgttgtctgagagctcctattcttcagcagtagaagtttgcaattaaaaaaattaaagaaatgcataatctaaaaattctctcctctcctctaattctaggaagaaattccatgttgggtgtgacataataaaacaggctcaattccgagcctttgcaattgtttctttttctgcctggattaatcttccctacgatcatgaatctgtctcctctgttatctcttcactgaggccggctctaactgtctggactgaaagaactctcccaattctccttttgttactctctactccatttatccgttttacgtttttcacaggaattagcatcatctaccattgcttaatgtcatttgtgcacttatattttcttttctcaatgagaatctaaacacatccctgtatcccgttactaaaacgttagctgacaaatggcaagcactcaatcaatgtttactaaatttaattgcaacaatttgttcaacacctattgacacgtattatgcaccaggttttatgctagatatcagagatataatgaaatataaaaccaagttcctgttctcaagaacctcccatcttgaggacagagaatataagtcaattactctagtggtgtgtggtaattttactggggtcctaatccagaccccaaaagagggttcttggatctcctgcaagaaagaattcagggaaaatccatagagtaaagtgaaagcaagtttattaagacagtgaaggaataaaagaatgtctgttccatagacagagaagcccagagggctgctggttgccctggttatttgttgattatatgctaaacaaggggtggtggattatttatgcctccccttttaaaaccatatagggtaacttcctgatgttgctatggcatttgtaaactgtcatggcgccggtgggagtgtagtagtgaggacaaccagcggttactctcgtggccatattggttttggtgggttttggctggcttctttactgcaacctgttttatcagcaaggtctttatgacctgtatcttgtgccaaccttctgtctcattctgtgacttagaatgccttaaccatctgggagtacagcccagtaggtctcagcctcattttacccacctcctattcaagatggagttgctctggttcacatgcctctgacagtaagctaaagtttgcttgagaaaagtgaattgaaaaagcctagttattttattgcataattagaataagaggtatcagaagcacatttatcaaagctaccagataggaattaacttcttctaggataaaatacattgttgtatttatcaccctaatgtagtttggaaaaagcctaccttattgtgcaatataaatcaagacttaagagaaactgtagaggatactagttaagggaacttaaacacattttttttccttgattttataggtaggttttcaaatgggaaatgaattgtttacgttcatttgcaaaatgaagagaagggaaagaaaaggcgctaaggctagactcacaaaagccgaattctcatgtgaagtccagccttgtggctacccataaagcagtggcattccaggtttatcaaagcctgaaaataaaatacaactatccagaacgtattggtaagagaagatgttaatcttgatcctcaggttcaaatagaaaaacaccttccaagttgaaactcttccctgccttttcaagccagaagagtccacattggtgtctatacaacttgattgaataattgacaactctcatctctgcactttgccctttagattttctcacacgccttgccaaaccaacatcttgggaacatggacaccacaaactttttaaaatggaaatatgtggactcccatagaagacgtgctacaagcacataaaactgactaaaagctttctgagaacagaaaccaagttggagctcacctttctcgcatttctatccacagtaattcctactcaaagtcagttaagggaatttaattgccaattaaattagtgccttttctcacctgtaagaggtcacttgcattatttttagtatatttggaaatgaaggcatagaaacatacaccaggcttccaggttacttggcgacaaggtttttttttcctaaaatttctaggaataggctacctccatgtctgtaatgggggtaacatcagcgtgaatggaagagtaaagatttctaaaaatctgcttctctataaaaacaataagaacactggcaaaatttccaaaatcagcttttccagacctgggaaacctcgcagaaatccaaggagcatttactcagaaaaaaacctgctgcatctcttggaaaaacagcaatctatgtgcagttgtaagttaccctgtgaaatcctctcctccaggatttacagcagcattgaaaacatagccctgcaatcatggtgacaactagcagcctagaaaccactagaaggggaagaatgagtgtggagctcccctaaaccccaatccctgagctttatttgattctgtagggcagtacactggaagtgcaattgacagcacttgtttttatttgacctgactcaaagcttggccagtgtgaaaggcctttttctcaaggcatttgttgaaaacaatcagcagtaattactcatcattgcagatgcctgaggcattgataacagttgggccaaacaaggagctgaattaaaaagaaaaagaaaagctggaaaatgagatatccatggagacttggaagacctccaacatatttctgagactctaggaggcaataggtctacatagaattttgtaaatttccagaaaatttcttagaaagtctgagttctcacttctggcttacttggagactctatgcaagcaggaagtgaagattaagtcagagttgtaaaatgccaaagtgagctgcaatgactatactaatatcagagtgagctgtaatgactatactaatatcagacaaaatgtgccttaagactaactgtcattagtgacaaagaaggatactttttaatgataaaagagttaatcaagaagacatgctaggtataaacatatatgtactgaacaacagagttccaaaatgcatgaggcaaatactgagagaattgaaggaagacataaatagttcaacgttaatagttggagacattgatatttcacttttaataatggctagaataactggacagagaccagtaaaaaatagaatgtctgaatagcaaagctaaaagagatctatatagctagcaccctacccaaaaacttgagattacattcttctcatgtgcagaaggtacattccccaagatgaatcatgtgtgaagccataaaatgtctcaataaatgtaaaaaaattaaaattatacaaagcatgttctctgatcataagaaaatgaaatgggaagttaataacaaaaggaaatttaggaaaattaaacaacactcttaaataaccaaaaagccaaaagagacagcataaagaacataaattatttttacaaatgagaacaaaaccacaacacactaaaacttacagaatgcagctattacagtcatttagaaggaaattgatagtggtaaatgcctatattaagaaataataaagatcgcaaatcaatagcctgattttctccttttagaagctaataatacaaaagcaaattaaatgcaaagtaaacagaaagaaagaaatgaaaatgattgaagtagaagtaaatagagaatagaaaaacaatagaggacataaataaaatcaaaagtaggttatttggaaaaatcaacaacattgacaaagtttaggtaggctgaccaagaaaaacagggagaaaatgtaaatgatcaaaatcaggtatgaatgggagtacttactactgaacctagagaaataaaaagaatataagcagttgtatgtcaacaaattcctagaaagacaaaaactacctaaactgacttgagaagaaatagaaaagctaaatatacttataacaataaagtgactattagtaataacaaatttttcacaagaaaaccctgggacatgatgacaagaatgactgatgaatcctaccaagtgtttaaaaaagaatgaatatcaatccttcacaacctctttcaagaaacataggaggaggagacattgcccagcgccttcgatgagggcattataccaaataccaaaaccacacaaagcatcacaaggaaataaaactgcagaccatatcccttattaatataattgcagaaatactcaacaaaatactagcaaaccaatccagcaatatataaaaaagattgtatgacatgatcaagtgagatttatctcaggaatgcaagggggatcacaaaatgaaaatcagtatgtaataggccaaactaataaaataaaagaaaacttctttacatggtcatttcaattgatgcagaaagagcacttggcaaaattcaacaactatttatgttaaaaaaaaacacacacaaaaaacactcaaactaggaagagtaagggacttcctcactctgataaaacttccgattaacatcatacttcatgaaaaaagaatgaaatctttttcccaaatatcagaaacagacaaggatatctactcttgtcacttctatttaacatacagaaagttttagtgagggtaattaggcaatttttaaaaagcatccattttagaaagggtaaataaaactgtacttgcagacaacacgatcttgtatatagaaaattctaaggtatctaataaaaggctattagaggtaataaatgagtccagaaatgttgcagggtacatcaatatatgaaaatcagctgtgcttccatataatagaaatgaataattcaaaaatgaaattaagaaaataattccatttatgacaacattaaaaagaataaaacaattagaaataaattaagcaaaagaactgtaaaacttgtttactgcaaactataaaacattgttgaaataaattaaataatacctaaatacatgggcagatgtcctgtgttcatagattagaagaaaacatttttaagatgtcagtgcttcccaaattgatctatagatgatatacaatcactctgaagatcctagctaccattatttttagaatttgtcaagtgaatcctcaaatttatatgggaatgcaaggcaccctgactagacaaaaaattttgaaaaagaagaacagagctgcaggaatcaaacttcccaatttcaaaacttattacaaactacaatcaaaaaaaggaagtggtagcataatgagagacatataaatcaatggaatagattttaaagcccagaaataatcctttatatttatggtcaatttttgacaagagtgccaagataattcaatgaagaaagaatagatttttcaaaaaaatagctctgggaaaagttgtactcctaccttatgccatgtattagtctgttcttacgctgctaataaagacatacctgagactgggtaatttataaaggagaagagttttaatagactcacagttccacatggctggggagtcctcacaccatcatggcagaaggcagaggaggagcaaaggcacatcttacattgagtcaggcaaaaggcttgtgcaggggaacttccatttataaaaccatcagaacttgtaagacgtattcactatcacaagaacagtatacagaaaaccacccctgtgatttggttatcttcacgtggccccacgtggggattgcacgtggggattattgcaattcaaggtgagctttgggtggggacacagccaaaccatttcataccatatacaaaaattcaccccaaatggctcaaatacttaattgtgaaaactaaatttattaaactcttagaaaaaaagtataaatctttttcaccttggattagacaactgattttagatatgataccaaaagttcaggcaacaacaacaacaaaatagatgaattggacttcattaaaattgagacttttgtgtttcaaaggatatcatcaagacagtgaaaaggcaatccactgaacagaagaaaatatttgcaaattatgtatatcaaaagggacaaacatgcagaatatgtaaagaattcctgcaactcaacaataaaaatataaaaatcccaatttaaaaatagacaaatggacaaagtatttgaatagatatttctacaaagaagatatataaatggccaataaacatgaaaaaatgttcaacatcattagtcagtagggaaatgcaaatcaaagccataatgagacaccccttcaaacccactagaatgattataattgtttttttttaaaaggaaaataacaattgttggtgaagatataaagaaattggaactcatatactgcaggtggaaatgtaaaatagtacagctgctatggaaaacactgtggtggttcctcaaaaatttaaatatgaagttaccagatgattcagcaatgtcactcctaagtatatacccaagagaactgaaaaacatgtcaacgcaaaaatttggacatgaatgtttgtagcagcattatttatatagccaaaaaactaggaagaaccaaaatgtccatcaatggatcaacagataaacaaaatgtgctatgtccatacaatgggattattcagtcataacaagaagtactgacacatgctgcaccatgaaccgaccttgaaaacagtgtgctaagtgaaagaagccaggcacaaatggttatacattctgagtccactgatgtgaaatctccagaatattccaaccctttgagacagaaagattaatgtttgttaggggttgaggtaggggaaaatggggaactactgctcatgagtacagtgcttatttagggggtgatagaaacgttctggaattagacattggtgttggttgcaccattttgtgaaaatactaaaaagcactaaactatatagtttaatgggtgaatttcatgatatgtgaattatatctcaaaaatgtaacttgtcaattactcaaaagctttcaggcttggtagtaagagctttttttgcatactttggttcatactattgttattcttacataatgcaggaaatttttgtcatgacacctcctagaacaattcttttgttaatgactcaattcccattggaaaactattaaagaggaaatgaaaaatgatgtgttttatttaagaaataatactactcattattcattgtcttctttctggattttctcagtgcttgaacatgaaagacagagaattgaccagaagcaagcgtccttagagtggggtcgtcatatttgagaaatgtgctacagggatctaggtatggtattctttcaagactcagcctctgcagtcttgagaaagggctggcatatgttttgagaagaaaatgtgtagatagctttttttgttttgtttttgttactttaccagcaatatttatttttggaaccagaaatatataggttgacatgtaatgccatcttaaagatcatgatgaatgatgagctactgggaaaagaaggctttggtgtcagctcattggcagactagagagctcccagccagcaaagatggagtttggagttctgcaaaaagaatagagtaattttgatctcgttaggaccagatcaaaaacaattgtctttttgatctgtgtttttaaagtattcatatgtaaaaaattatctgtaataataagacatactaaaaggggcattattcattgcatatataatctggaatagcatctttaatgcttctatgacatttttaatgttgtttaatgtttaacttttaataaaaaaggaaaattcatatttgaccttaaaatgcattagaatatatagcaatttaagcagcagattttcttcattgttttttcttcatataattaagttatatcaagtttgtgtaggatgaggccattatcttctaatgctggaaggccaagtggtaaaatacttgtggtattattctaagaggatgttgcatatagataattgacaaatgattgcatttgatgtctatttagtgatgacatgacaataatgaaaatatataataatacaaggataaattaataatgatgacatccattttctctttttggtgaagcttatttacatttgcataaaattttataattgaattctggctatatatagcatcctttgtcatccgactttgaccaaatagggtcaggttgctggggctgttatctctcatttaattgtatgtttgcaactaggtattcttttctgctatgaccctgatatttgaatgactaataggcactgtgtactgagaatataataatgagcagttagatatcatctgtgcatttaagttataaactctatgggataaacaaaccaccaagaaattcaaaaaaaattgagattagaatgatcacaggagaaatacagaatcctagaatgtgaggcagctaaagatttacccaagatgagcctggcaagtaaggtagaaccctggctaatcagagttttaaaaaccaggtcaaggagtttagactttgttccaaggactagcagaaaccattaaagagttttaggtaggaaatggtataattagacttgcagttttgaaaggagacactgtttgtatgtgttgtaataacataatttattatctagatcagggcagtttggagaataaaaagtggtgtcattgctaattatgctgagactacgggtattaaaactcttgctgccctggacaacctaggacatacagtcaccctatttacagggaactgcaatggaattagactggtacatgaagaaaagttaggaaagaggaagataattttaactatgatgagacagtcaatagagaaagagatagacaaatatgatagttaactcagaaaaatgaacataaaaagttggtcatggattgaatgtgaaaaaggatagaaggttaagaaatctaccaggcatctgtcttgtaaaactgaatgagtgctggggacatttactgagatggggaatgttggataagttttagagagaaggtgatagttttagatatgttcatgttgagctgaagataaccattaggcactgacaaagagctggtatcaggatttacacaagctggtccttcacataagcagctgccatctgaggtggtagctggcctgcagtgacggtgtgggccgcggagcactagccatcacccacgtatctctagtacactcatggttctagaaatatcaagcactcactgtattccccactcatcctgattgtgtggctcaaagaccagaaatgtagtctaattctggatttttatcctgatttatctggagaaatgccttaagaacttctcctcccaagcaagatgtttggagatgtctagtgtgaagggtggttaaaaaaaaattttacaagctgcccttttgggatctgacagtcccgataaattaagacgcaatgtgcttgacgatcaaaagtggtaagatctgatgttgatggatggtgcattttgccttggatacaatcaactctgccataaaaccagtaaagattattactgtttctcagggaagaagtaatttaagattcaatatgggaagtaaaataaaatttgaatactacaggctaaaaaataattttgtgtgtgtgtgtgtgtgataggtggaacttcacttttcattttatacacaaaagcccctgtagaagcgactccattgtcttgtttttatcacttattctaggtaaatttggctcttgaatctttcaatttaagtccattttggattttgaaatgaaagatgaacagaactcaagtacacatgtgtaggttagacacttggaaggtgatgtgaaatatatcaagaatattatatgtactttcttataaaagatattcagctttgttttgtttattgtttatctttcatttttgggtggcccaattttcttcagacctgacctctgcactgatggagtattcaaaacttgaaagaaactatacaaatattatgaatgtgcatgcccatgtgtggatctttgagttgcaagaaccttttatgtagggcaaacattagtattcctcatgtttaaaaaaaatggaaaaaaaaggtgatatgattgtgacttgttgaagttctgaaattaactaggcaaaggacaattcgaaaggcaattgtccctgtcttttgtatgaaacacagctttgagatcagaggtgttggttgagagtgtttccaaaacccaagtgtggatcttgttcacgtgtgtttagcaaatctcaatgactgaacttgggcattgcaagagctcccttggtcccctccccataccccactgggatgcacataatacagctgtactcaccttgaggttgaaataggtgtagagctgatgagttggagaaaaagtccccagcattccagaattagatttatctcttgtcactttgcttaaagtatgcaggtgtttgagggactttgagaatcataatactattgcttcctttcatattaataacagaaaaactttttattataacaatttataatattaccttgctctaaattactagaaatatttgccatagtctcattcctttttcatgggaaaaatgtgtaggattatttattaatacttctaagcttctcaaacaaaaaaattcccaatttgttcaactctgattcatgtttcatagatctgaaaaactgtagggctgactcaaagctatttttaaatggccatatcttcaacaatgacatttatgaaaaatgagcatctgttgtaaaatctgcaacatgaagataacttccaaggttctttccggctccacagaaattctatcaatattttaattcatgggatctgacagtcctacggttttactttataaaactattaaatacctgaaatattaagaagtaaacttctctttctctcttttattttttaatttttatttttttgctgttatcattggatgctagaaataaagtatttttgtttccttagtcttgcaaagtggaaagttttaaaataaagaagtcaggcctgacacagtggctcacacctgtaatcccagcactttggaaggccaaggcgggcggatcacttgaggtcaggagttcgagaccagcctggccaacatggtgaaactccacctccactaaaaatacaaaaattaatcggcatggtagtgcacacctgcgatcccagctactcgggaggctgaagcaggagaatctcttgaacccaggatgcagaggttacagtgagctgagatcatgccattacacttcagcctgggcaacagagcaagacttcatctctaaataaataaataaataaataaataaatagataaataaaataaaaaagtaaatgccttgaaaagaagaatcctaaatgatctagtcttggaaattataattggttaattaaaatcggaaggtgctgtgtttggtcacttgtccttgtagagacacagccaatgaagcagatgaaaaaaaaaattctctggcctcatactaatggtatttcattcataaaaagaaactgtgccctgagatttaattgagtggttccagggccatcccagcagaaaatcagctggttgggcttctatataaacatgatgacatgttgagggcggtgtttacttttttctaattaaagcaaattagaaattccattatatttctgcagtgatttctgacagcagcatgccctgggaaatactcatggtacttctcgagtaaggctttcttccatgccacattcatttattcccttcagtttttaaactcatcccatgctctaagtattgaagccggctctgagaccttggtttttcaggatcatttaaaaacaagactgcaggacccagcggaattcagaccaactatttgtgatgacgtttgatgttttcagccttggtagtggttctcttgagacaagtcactctgttttctttcccttcttcagttctgtcaactttcataatattgaggcaaaacctccagttgagtacccagtttagcaacgagtaatcttttgcagggacccacactattaacagaaacaattaagaagccaatgaaaatacatcaactgcacagcaaaagcaggtacttgtcatgcatggtgaagggctttgtttttcattaatgatactctttttttttttttttttttttgagacagagtctcgctctgttgcccaggctggagtgcagtgacgcgatctttgctcactgccagctccgcctcttgggttcatgccattctcctgcctcagcctcccaagcagctgggactacaggcgcccaccactgcgcccggctaattttttgtatttttagtaaagacagggtttcactgtgctagccaggatggtctcgatctcctgacctcgtgatccacccgcctcggcctcccaaagtgctgggattacaggcgtgagccaccacgcctggccaatgatactcctattctatattttaaaaccatcattcagaggctagaggtgtgtgagttttgattttttttaaataatgcccattgtacatttatgtaatagctgttaagaaggtctcaaaattcaatgccacggcacactaaaattctgtttaatgagctgcacatttaagaaaaaaaaataggaagctcactaaaatgttgttcatttccaaattcatagtcacattttattgtcttaaccttttctttaacttataatttcaaggctaaattttagatgccagaaaacttcttacaaggaaacttatactcaggggatctccaactcattgccaataagaagagttcacataaagacacaggagttcagataaagttacacaaggtttagaaaagtatttaaatttttccatgttcctctaaactgaaactggactctgggtcttgatgagctaatatctaaagacaatgtcaagtttacaaaagaggatgtcttttgtaaatgagacttctagaggcagaaaatgaagaatttgacacattctgaagccttctaaactaaaaggaaagaacaggtctgtgactgtagcaagaactgggttgttctggaaaccttgatatattaagaaagtggaagtcaggtatttatctgatatgtgttattatcaatatctccaagaaaattcaaagtgcaaatcatatattaaaatcaaaacttgaatgtcaactctaggtataggtataagggattttcaaaggccttctctctttttcttctaactgcttgattgtagctcagctgatgcattggaaaaacggaataggaagtgaattcatctcctgaattgcaacaggagatgaaattttgctcaattagatttgtaattgttgtaacctttagcagttcttgtgaagataatggcagggaaaaagactgaatggaatttttcagactttattttcttcattgtgctcaagtgtgtcttgtgtgtccaaagataatcaagaattggctgtaaataaaattcggtctcaaggaaagatatccctctcctctcccaggttcccagaccacctgttcatgcagtcatggaatttctcctttactaaaatgagctttatatagtcaaacatctcataaaacgggagaggggcctgtgaaataacaggagagagtatttaaagggtctgacttacagaaatgcgcccagatgagtttggccaattggggtcagttaagcctcccctgacaccagccattagtaatattttccatgcactaagtaaaacaatggaaattcatcacatctggttgagcctccaatacctatgcagcttgtaatggtttttgcaatcttgatatgaaacagcaccgtggcactcaacgatagattgttagtgagcaaagaaggcacacttgttccaaaacaatgaagagttgcttattaccatttcccttagatgcctccctctggttcatgttgctagagcatttcatcttgatccaaagagaatttggggttattttcctcccctacttcttcccctatctttagagcaatcagcagtaaacctctagaaaaagaaaaaaatcattctgtatttcttctggggcaccacactttcttattgaaaagttttggttggctggataagtttctttgaaggtaaagaaaaagagcttgaaaagattgatgaattcaagaaatatttgccaccttagagatcttgttcttaccttaccttttctttaagtacttgagatttagaaaaaggacatcgagcatacctgaatggtccttaagccatgtacttgatgttaatactgaagaatgatgttttaaaatcccaatgtatccaccattgttctctttgagtagaatcaataaataagtttcttataggttacagaaacaatagctcaaagaggcagagtctatgtctatcttgttcaccatttccaacactcatcaagccacaaggagacactcaatgcatgtttgttaaatgcctgactgttacctaagttttcttcctctgaaaacaactatatttgtaggttgtagtgttaaggcactcaatatcacattgccaatgtgaaggatataggactaggcgtcaaaagtactattgctagttctaaatttgtagtaattacagtaataataataagcatttattaagagcttaaaattatcatgcattaactcattttttacccataatgttgtaaagcaggtattcatactatcaactaaatgtttggaaagcagatattgaggcatggagaagttaatcaaatcacagagctagtaagtggtgaagtcaagattttaatccagagctttttctctaaatataatattttgcaagtaaaatagttgtgttttgctaaaccaatcactttgcactttagtggctacctgtatgagattagcataatcttacctacctcagaagaacagtacagatgggggcttcaaactgaatatttatgggtacattttccaatataaatatgtatgagatagtttactgtttccaggacgcttacattaccatcagatgtcacaggacttgggggccaagatagaaacgattgagatctcccttttaccatcgttcaaattcacattgttctggggacaaatgatattcttcaataaaacaggaatctttgtggcataaattcttggagcaaagtagcatacataaaatgtttctgtttgtaaaaaaaaaaacacctctcatatgttaagtttttatttttagtttccatctagaccagtaattttccatttccttcttaggaagattttcttaatgcactcacacattcacacacccctgcacacactcacatgtacacacatgtacattcacacgcacagattctcatgcgtactcacccagaggcatatatacacacatgtccctgcgacagggtgacaatgtgcctgattgcttgttggtggcagatggcgatagaacatggtatttctgaagacatgcccaaggtttccaggtggtcagggaaaattccatagttttatcttctgaggtctttgagttaaggaggggaatttttattttgtttccttttaggaacagataaagagaataatacaatttcagggattgacataaattaatccttaagtctgatgtatttgggaatgattaaaatgatggtatttaaggtcactactgatgttcttgtcacacttgtattggtggacttttactcaatttcactatgaattattgagatgttgtgataccagtttgaaaatatgtgtgtgtgtatgcatgcatgcgtgtcctaatcctctttgacttcttcaaatggcggacaagtagtccatcattgagattgtctcataacctacagaaaatattaaattagctctatatcaaacattaagcatacaagcagggcaaactgatcccagaaaatcctttgtgacatggattttaaaattgcacttacctcggccaggtggggtggctcacacttgtaatcccagcacttcgggaggccaaagcaggtggatcacttggggccaggagtttgagaccaacctggccaatgtggtgaaacactctctactaaaaatacaaaaaaataaaaataaaaataaccgggcatggtggcatgcacctgtattcccagctacttgagaggccgaggcaggagaatcgcttgggcccaggaggcagaggttgcaatgaatgcagattgtgccacagcagtccatgctgggcaacagagtgagattctatgtccaaaaacaacaacgacaacaaaaacccactcaccttatgtatagttacactgccttattttttttctccctgaaattagcaagcaaaaataggatttccttctcaatttgggcaacagcctttcaaaggtccatggccttcatcttgtgtgttgatttttcttctttctcagtgcctacccacttttcctgggataggtgattttcttcttctccaggactggctgtcatatagcatgggaagatttactaactggcgtctaaggaaaagacagcaatgtgtattaaaataagtcaatataaatgagttgtctatgtacataaatgagttgaacataatcttcactgttgaataatgacataattccctttccttgattgacaaatcaaaaattcaggactgtagacttttttttcctagctcaatttgatcaatcaatacttaaggccacacagtgccaaaatcagcatctgtgagtgtgcgtgtatacacatgtgtagcagttgtgtggcgtgagtagggtggacactaataattcatattttaagtgggtgccctttcattctggttgcctttcaaggcctttttttgtttgtttttcaaagacttattttaatacacattgccatcctagcctttgacgccagttagtaaatcctcccaggacttacctttaacatcagttttctcagcttctatcaataatatcctcacataaaggcttattaaagattcaaattgtggccgggcacggtggctcacgcctgtaatcccagcactttgggaagccgaggcgggtggatcacaaggtcaggagtttgacaccagcctggcgaatatggtgaaaccctgtctctactaaaattacaaaaattagccgggtgtggtgatgcatgcccgtagtcccagcaactcgggaggctgaggcaggagaatcgcttgactccgggaggcgtaggttgtagtgagccaagatctcatcactgcattccagcctgggtgacagagtgagactccatctcaattaaaaaaaaaaaaaaaagattaaatggtgtatcttggcgtttggaggaccaggagtagcacagagaggctgtgagcgccagggctgggaatcaggagctcatgccctactgtgcatatccctatgagtatttgcaagtgccacagccattccagtcctcaataaaatcaggatacgggaaaacaagtcctgatgattatttctagttttaacaatctgtgaatctaagctttaaagcagtatattcagaatgtgagatatttcgttctccttaaacttgactgttatctgtagataaggcaggttgaaatccatggaagtaggtgtgcccacacaccggtaaatacagagtctgatgagataggctaattaagcatgtagacagaaaaaagtcaccttgagtgtggtcagattttttaaaatatacataatttagccgcttcatggtcttgtttagtcactgatttagttactgtgttttttgtactacctagtacaagaaagaagtttctgggtaggctcaagacatttggaaaaataagctaaataaatacatatttaaattaaaactaaaattaaaataagttaataagaaaaaaatttggaaaaataaattagattcccccctccaaatattgattgagcatcaattaagtgagtttctaaaatgtgagaaattagatgtttaatcaataagtaaataacgtaaacacagcgtccctttaatcttggaactaacaatttctttgtgaaaggaatctgtgaacacttgaatgacagtgcattataataatacatgagcacctgaggatgtagtgatgcaagagggaaatgacagttgcctacaacagtggaaggaaggggcaaagaaagattctaagcaagtgccatacaaactaaacacaccttcttcagagaagggagataccattgtggcctggagtgggcagaatttggtctagatctggatgatttgaggataattttttttatgtgggaagaaaagagagatggaatatgaagggggaatggcatgaacaatggtatagaaaaggatttgcgggattgaacggtccaaggacaagagcaatggatgataatgttggaaaggtatattgaatgggacatctagggagatgtgaacggtgagcttaacctatggatcctgcagcactgtccaagttttggggtgcagaagagtgacactgtgattcagaaaatcaagagactggagactaatgagtgcagcatagtccagatgtggtaataattaagtaagctgctgtcatatccatggacacggaaaggaaaagagttatgtgggcatattttgaaatcagatatacatatagtatatcctttcaagccatcaaaacatatcacaattttgccttaagtttccaaatacatctttcttctttgatctctcctcccttctaaaaaatctgattgcacgaaagtaaggtaaatatagaaaaaagtaagtgcagatatcacaagctgaaattaagagccagagaatttcagttctctgaaactgagtcctcatgaggaacctaggtcagttcaagtgcagattaagacaaaggggtgggaacctctgtgtccaagaacaggaatcaaaagcaagtcaataaggcggcgaacagctatctttggtttatttttaactcttctgccctgcctcttttgtacatacgcgttgtctttcttacagtggaattactttgctcttgcctcagaaagctctagaaaatcaacgagtttctgctaagttggtagactagagggccatatctcacatatcccacactgcgttctggtttaagctatcctcaaaagatcaggatttcacattataaaaggatcctgaactaattgttctctgagttagctctaactaaactgatttgaatcccaaagtaaagagagtctataaatctcaatcccaatttcaaagcgatcaggaaagatgagtccagcctcagtggtgcatggataccctcagaagcagggtgacaaaagtgtggattttgagcatccaaaatgtttggcccttagtcatggctaataaaatattctctaagtaccgatttttaaaaatttaacttttgtaaagagcgttttatgagtgatgctgtattagtatctattgctgcataactgattgttccaatatttagatgcttaaaacaataaatgtttattctctgtttctctgtatcagatatttgggcatggccttactgggtacctctggctcaggatttctcttgagcttgcaaacaaggtgttagaagaggttgtattcatctcaaagcttgactagtggatgatccacttcccaacttgctcatatggcccaggtccttactagctattggctggagacatatgggaccctccaggggccactcacaacgtagacagttgcttgctttatcgagagcaggggttcgagagagagagagtgacacctacactgaagttacagtctttttattacctgacctcagaagaaacataccattgcttttgccgcattcagttcagtagaagtgagtcattattaataggtccagcctacactcaagtgaaggggatttcatgtcggcttgaatatcaggaaggtgggatcactgggagtcatttcagagactgcctaccacagatgtgatagtggtgttgtggcagaaatcctctgcgctcctgctaccccaatggtggcccacggattagcagcataagaccacctgaaagcttgatagaaatgtagcatctcaggtccaatcccacccaggccagctgaatcagaatctgcatttaacaaggtccagagattcttcatgtgcataccaacgtttgagaagctctaggctataggagcttcacataatgaatcttagaggaaactacttttaaactgacacccacgcaccggagtctctatcttggagcagatggtgataagctgatgagattctgctttctatgcttttcgaaaacacaggcttgggcaggtaatccatagtcttaaaatgcacacacagtcacagtttaatggcttaatgatgaagcctgaacttttgttggccatcagacgttaacaatgaccacatggacgtctccgattcctgcatagcatttatagggaaaaccagatctttgaacttatgaaaaacccctaacccatcatccaagcacctttcattcctagagattatcagagttttcattacaggttaaattctttgtaactttttcatgtggaaactatcccgttacctcctgttagttctcctgctgagtgcaaatggagtgtatactctacttcctacagctgttttggattttgttacattttccaggttttgggaaaaaaaatgtgctgacagaatgtggcttcatctacaactctcaactgatttaagagtataaacagaaatacgtttcctgattgtatgtaccaatgaaataataatattatccaaagatccactagccattttatttttagaaactgggcattaattaaagagaaacagaaaaatatgctggggaaaggtcattgtgagataaagacagcaaatatggctagacaaaacaaaaaaaagatacatttttggtttgcactattttcagtggaagatagttgcttttttttttttttttttttgagatggagtttcgctctctgttgcccaggctggagtgcagtggtgcaatctcgactcactgcaacctctgcttcctgggttcaagcgattctcctgtctcagcctcccgagtagctgggattacaggcacccgccaccacgcccggctaattttttgtatttttagtagagacgaggtttcaccatgttggccgggctggtcttgaactcctgacctcaggtgatctgtctgccttggcctcccaaagtgctgggattacaggcgtaagccaccgcgcctggccaatagttgctttttaaatggaaaaacaaaaaacaaaacaaacaaacaaaaaacctttccattcgtatctgggcagaaagtcagagtcaaatagatataattggaaaagtttactaaatgatggacttatgttacatttccccccaactgatcttttttgttttattttacataatggagtaaaatcctcttaaataaatatatgtgaaagcagaatgctccagtcacattttatcgtaacaagatgaaacaaataaaaacttaaatctgaggcactaagaggtaaacaacttttgcttgggctacacaatgacacttagcccgtctgttaatagtgtggagagcacatcttccctttttgttttcagggatgaggttgtaagtaataaaattatgagtaatttttgggctctcccaactggtaaaaatcctcaaggtgtgttttatcaactcaagtagatggagtgcttcatggtccagaataaaggggctggaagatgaaatatgttgggatgttagaggcaaggggctgctggggagctcataaagttagaatcacgttgggacctatttattgagaaaaggcaggtgagacagggctaagagattgctggggagattgatcctggtaatggcagctgggcagtcccaagtccaggttccaaaggacaaaaaagccaaattaagatccagcgagtcacaccagaaagtccactctggatgacagagcacatgtggtgggcagtctaggtgtgttgtaggtggtgttgtgggaactctgactttaaggattttatcccatttagggggattgacaaatccaggtcacataataggatgccagctatgaaatccaggggttggaatagggccttcactcacaaggataaatatggatgttggtttgcttagcactgacccaaggcaaaagctcagtaccatgccctaaaatagaaaaaaatgtaagggatgctgtgagttggagagaggaaagaacttccaaagagactcaggtcatccgtttgacctcctggatagaagtttggtgaataaaggagacttaggtagggagtggggagttggaacacaatgtaggagtctagatttagtctctggaccacgagatttggggggtgagaacactgaattgtttttaatctcctccttcaccaccctggagaagttggtaaagcaattgtaggggctgggacgccatgtgagtccatctggatctatccagaccgggagacgcagcatgaaaaaaatgaagatggtgctgatatcaacttgtttcactctggtcactttccttcctctagaaagttgctgctgggtcagggtgattagctggggacatgcttacaggtttctgttgttttactttatgtggtttcttatgagcaagagggaaagtgctgatcttgtagctctataatcaagaagacgcccttattagttcccattctggtaaataggagcagtatctaatttcctttggaagcaaggcagtagaagagaaagggtatactaccatgaaaagcaatcctgcctggaaccaatgtgtttgagtattgaactttgggtcacacagagtttttcccagcaatgatattcgaatacataattactctgctcttcatgtggtattggtagtgcaaaaaacaagtgtgtactttgtatttattttccagatttcccatttattgttccccaaacagagtgacggtgcaagttttattccaccacattgaaagatagctgctcttggcttcaggaagctttttcctttccttttatttcttttcaatcctccctttctttgtttggtgactgggtgcccctccatgtgtcatcttctttcaatagcacagctaccatcaggaatcatagctaaaatacttaacaaccaatgcatctcaggtatggaacaactggaatggacatcgaccttaatctggagcagaaaacaaggggccctctgctctgcccaaaggttaacagtttaattgtgggattgtggtgagttcaagaggctgcagaagatatggtaaggggattcagggtagcagctagtttaccaagtggtatagaaatatttacatactgagaaatatttactatactgagatgctcatatcagtgcatactggctcattatcaaggctgatatttgtttctagaatgtggtgacgggaccagtatacttgaagctacagagagaccctgatgactaactgatacagtctccttatctctcacgtttgttaattctataagtacttattgagcatccactatatgttggacacttatcaaggtactggtaagatactggtgaatacgacaaaaagaaattcctgcttatcttctagtaggggagatagacaacaaataaaaagggaaaaaagaatgtatgatgtgatttcaggttgtgataagtgctgaggaaaaacaaagcacaacaggccagtggagagaagaaggcttgagaaagggtattggattaggcgtcagggaagacttttctgaggaattgacacttgagcaaagacctgaatgaaaagaggaaacaggccatcaactctctggggaaggagtcccaggcagatgtgacactatgtgcgaaagtcctcaaggtgggaaggactgtggcatgttacatgagcagaaaggcagtacagcaggagctgagagatggaggggagagtgttaggagaggatagaaagtaggtagtggcccagtgcacctaggccacgggaaggagttgggattttaatctgaacatgatagagcaccactggatacgtatgatctgaattatatttgaagaagagcacttcagctgatgtgctgagaaggtacttgtggagggatcagtagaaacatggagtccagttagtttgctttttgtttttgagatcagacaaggggtaattaggcctaaagttaccagggctcagaaaatctacatgcctggttccaagccacactgttgaagtttggtcccaattttccagatgtcataatgcaatcagtgctggccatctgaaagtttagggaacatggcctctcaccaagaacgtgttacttgcccaaacctcacctcttctctccccatcctgttgtaatctttgaactaggaaaattctaacattggatagttgataacaaaattgaaagactgtgtaaatactcttgagttaacaaggtaagggataagcctaattttcttaccattgggctcaaaggcaatacctttgtctgttttaagaaaactgagaaccagagtgggtgcggtggctcacacctataatcccagcactttgggaggccgaggtggatggatcacttgaggttaggagttcaagagcagcctggccaacatggcaaaaccctgtctctactaaaaatacaaaaattagccaggcgtggtggcacacgcctgtagtcctagctacttggaaggctgaggtgggagaatcccttgaaccagggaggcagaagctgcagtgagctgagattgtaccactgcactccagcctgggcgacagagcaaggctctgtctagaaaacaaacaaacaaaaaacaaaactgggaatcactgatgagtaaattttaaagcaaagtgcagatagagccatggggaaaaagaaaataataaggatgaggcaagaaacagaaactggagataaggcagttcttctaaaaggcacccagatcagatgggaaaatgccagctcctgctttcatgcagtttgcaattaggttccaatagctgtttctccctgaggtccatcttcccacagtccagggtcctgcagttatcacaatgttttgaattgtgaaatctctctctctgtctcactactctgcctttcatctctgaatgactaatactgtatgcaatgcgtaacattttagggacactttgcaatcatagcacacaatggctacccgtggaccacatctctttttcaggtttgttgggcctacagagagtttttggaaatttgaataagctgctgtattagttttctactgttgtgtagccaattaccacatactcagcagcttaaaacaatatacatttattatctcatcatttccacggctcaagagtccaggcacggcttagccgagtctgctcagggtcttaccaggctgcaacccaagaggctggccaggctgcattttcatctggaggcgccaggggaaagaagccacttctttttttcttttttttattttttgagacagagtctcactctgtcgcccaggctggaatgtagtggtgtgatcttggctcactgcaacctctgcctcctgggttcacgaaattctcctgcctcagcctcctgagtagctgggactacagatgcgtgccaccacgcccagctaattttttgtatttttagtagagacagggtttcaccacgttggccaggatggtctcgatctcttgaccttgtgatcctcccaactcggcctcccaaagtgctgggtttatagacatgagccaccgcgcccggccagaagaagccacttctaacctcaatcaggttgtggatgaaattcactttgtgcagctatcagttgtatgattgaagattctaacattttgctagccggaagctgctcaagggccctagaggcacagttgcttgtcctgtgggcttttctgccatggctgcttacttcatctcacttcggggagggacaagtttctcctttaagggcactcacctgattgagtctggctcatccaccatcattctttgctttttgattaactctgaatcaactggcttggaatcttaattacatccagaaaaagactttccctctaggtcatattctcttggctagaagcaagtcacaagttcatcctacagccaaggaagggggtcacacaacgtatcaggaatcatgggagcttctgttgggtctgcccaccacagttgactacatatacaaattagcaaagtgcacagaatttagtttttcagtttcttttttctttttcttttctttttttgtttttgagacaaagtctagctctgtcgtccaggctggagtgcagtggcacaatcttggctcactgcaacctctgcctcatgggtttaaacgattctcctgcctcagcctcctgagtagccgggactacaggtgcccaccaccacgcctggctaattttttgtatttttagtagagacagggtttcatcatgttgggcgggctggtctcaaactcctgacctcgtgatctgcctgcctcagcctcccaaagtaatgggattacaggcgtgagccaccgagtccggcctttcactttcatttgaaaaaaaaaaaaaagaatcagagtagacactggggccatattctcacctgacatcagcccgcaggagtgggctattgacaaccccctttggttagacatgctccctgagtttctattattcccctctctgattttgtctaattgtttattcatttgtgtcaactgcttcactctgccatttatggttacaagtcccatagtaaacatttgctagaattatgtaatgacaattattttgcttgtgtttttgttgcttttgtgtatgtttaaccgaagtctccttcagagcctaaaggaatgttggagattatttaattcacctattttacagagaaaactgaagctcccaaaagtgactttgccaggttcatacaagttgttaaaaccccaaactcaagattcttccaattcaagccctgcagcatttctttgagaatgaaagcaaagaagaattggccaactcatgtcccaggagacaatctggaaatattttgctgtaaatccatacctcccgtctcgaggaaaacttagcatttttcgagtattagaaatcaccatgaacattgtgcatcattaggcccatggagagcttttgcttcttctgcagaggctttagtgcagttgaagatttaccagcacgtgccaatgagctgtcaccgtgtctttattcaaaaggtctctgtctaccaacggcatactgcatactgagaaatgtacaccttttggtgtgtgctcaataattgaacctgcacttctcatggggttccagagccaggaaacacatgttcaaattccagctctgtcatttgctatgtgactggccttgggcaagttattaaattctctgtgcctcagttttctcatttgcagaatgggtattagaataaaattttaaaatagtattacatgagttaataaatgtaaagcacttagaatggtgcctgactcaataacatatatctattaatattaattattattattattattactttcactcgtgttcctgcatagatgcttgtggttgagttgtgttacctagatcttgaatttgcattctcactgggtgcaatatcattcccaatagggaaaaaaatttgtttattgggaaacaaaaaaatcttattcttttaatgtatgaaacataaacataaaatatataaacagaaatactgtgtacttatattacaatttcatgggaggattgattagttaaaaaaatgcctaagaagccttgttggaagagtgaaaatgggggaaaaaagggttgagaaacactgttttagaagaacaagagaagacaggccaggcatggtggctcacacctgtaatcccagcactttgggagctgaggctgtcagatcgcttgaggccaggagttcaagaccagcctggccaatgtggtgaaaccccatctctactaaaattacaaaaattagctgggtgtggtggcatacgcctgtgatcccagctacttgggaggctgtggcacaagaatggcttgaatccaggaggccgaggttgcagtgagccgagatcacactaccacactccagcctgggtgacacagtgagactgtcttaaaaaaaaaaaaaaaaaaaaaaaagaaaggaagggcaagagaagacaggtcaaacataataaagggtttcaagatgtgatggcagagcaggaaaccaagcacggagcccttctgatttccagatccttcctgtgtgactgtccagcatgtacactgatgaaggcagccctgatgacgggcagtctgtggtgtctctgatgactcttctgaggggtatcataggacaactcaggatgtctcctttcttagtaacctccctcatcattaggactgttgcccatagtgtggaaggaaggtagaaccaccttttgccgagtttagcctatttttcctagattagaaacaaactgctaatacctgggtaaaaaatgaaagagttagtgaaactcaatgagtgtttcagtggttttgttgcctccctgccaacccaaggtttcgtccttttgtgtattaatttggtctccattctatgctctcccaaaacatgaaagttcttttattttacttatttattaatttatttattttgagatagagttttgctcttgttgcccaggctggagtgcaatggcatgatctcggctcactgcaacctccacctccggggttcaagcaattctcctgcctcagggtcccaactagctgggattataggcattcactaccacgcccagctaatttttttgtatttttgatagagacggggtttccatgttggttaggctggtcttgaactcccgacctcagatagtgtgcccgcttcggcctcccaaagtgctgggattacaggggtgagccaccacgcccggccgcaagttcttttattttacaaattttatttctgataatttgagatgaaagcaagtagagagaaaaaaaaagatttcttgataaaaatgaagccttcggcttcctccatatctgaccctcgttcagagtttctggtgctgtttaactctggagatttgtaagaggaaatgacctaagtttactacggggcttacgcagaggtcctgctcagcactgcccaggagtaccgattgctaactctgtccttccctctgatgccaggtcccaaaaatagcccagtgggaacaacacagcagcctctccctcacggcctgcaaatcaaagccctgattaggtcaaaggatgggaaatgtggctatatcgctgctcagaggctcttcaatgccaagggtgtagaagcttcctgttccttcagatgttgggacagagccgctgggcaggcttcactcaggagaccttgctccatctcttttgagtccttgaatctgctggggagaagcagttttcccgtggaagcctttgagtccctaagattctggaagtccagggaagagcacttcaatttgtaattgcagacatctgacccaagaaaggctggccttgctggagatgcctcactccctaggaaaatcaattttggtttatttcatggaagaaataagaccactgaagatttttccttctttctcatttctggtgggcacacttgaaaatggcagctagtatcattgtaatgtcaccttacagcttatatcaaaagcgtataaaagtctttgccccataactaaagggctcctttggggtgtggggaggtattgaggggaagtgacagagcagaataaggaggggtataaaaatcctctatgtcttagtccgtttgggctgttacagcaaacatatcacaacaaagaggcttatacacaacagaaatttatttctcgtagatttggaggctgggaagtccagatcaaggcacgagcagactcaatatctagtgagggcctacttgctcatacatgactgatatggttaggctttgtgtcctcacccaaatctcatcttgaattgcaatctccaggtgtcgagggagggacctggtgggaggtgatgggatcatgagggcagttctccccatgtggttctcatgatagtgagtgagttctcacaatagctgatggttttataaggcagttttccctgctcttactcactcttctctttcctgccatcatgtgaagaaggttcttgcttcctcttcaccttctgccatgattgtaagtttcctgaggtctcctcagccatgtagaactgtcagtcaattttctttattaaaaaacccagtcttgggcagttctttatagcagtgtgaaaatgaactaatacaatgactctcttctcattgtaccctcacatggcagaagaggtgagggtcttttgggggtctcttttatcctattcctgagggctctgcccccttgacctaatcacctttctaaaattggcctcctaattccatcaccctgggctttaggatttcagcgtatgaatttgggggaatgcaaacatttagaccattgcactttataacaaggattagtaaatgatgccccaatcctcccccaccccccacacctgtgtttgtaaatataattgcactgggattttcttttccatgcttattcatttgtgtattttccatggcagctttcataatacaaaggcagagctgaggagtcctgatagggatcacgcgtcccacaaagcctaaaatatctggctctttacagaaaaagcctactgatccctgctttataataatggccatacatttagtgtttcctatgctgtgtacattatatagcttttctcattcaggtctcccaacaatagtgcaaagtggatactgttctctccactttacagatggggaaggagaggaaaagcttgttcaaggtcacgcacatggtaaatgataaggctgggtgtgaatctatagctgtctgatattatgattttttttttttttctagcacactgcattgcctcacagctaaattcccactggattgttggtctgaatcaccgattgaaaaatcaaatgtcttcagggacccggcaggatcccgaaggacgccgctctaagccagagggagcggtgtgtgttgtggctgaagtggaaaatacaagcccagtttaagggcattcaaacatgaattgttttttttaaagccgtgcgagtcaaacaaaacatgtcagcagttcttattaggctaacaggttgctggtttgtgacccttggaccgatcctcaaccaggttgggcaagggaaacgatgatatgctgagaatggaaaccagaccgcccattggtctccccctccggccccggttcacttctttgggaacatcttagatggctgcatggagaaacacggacctttggcctgtttttttcctccgagctctgccacctagtcttggtatgacttcaagcaaatagactaacctctatgagcttccgatttttcatcctttaaaactgagatttacttatctcacatttattggtccatggtgtgcgtcaggagctgcactggtcttggcttatctcaggaaatggcaactccatacttccacttgctcagagaaaaacctttagtgtgctccttgattcttctcttgttattacacctatgaccaatctgtcagcacaacctgctgtctctgtatgcagtaagcatccggaatctgaacaattctcatttcgatcactaatgaaaccgtgccccaaagagttaaaaaaatgactagcaaatattcttgagtttgcaggatggcagagaaggaaaagaaaaacaacttgccgaaaggctgaaactccttctgcttgcaagatgtcaaaactgactaaaattggctaaaaccaatttggccagctagagtctgcacacagaaccagcttgttgacatcacaacccaaatttccactgcaggttttatactaattccaccctcaaatttacacatacaatctatggggtagcatggagaagtgcatgtgctagaagactttccagacctcccctttgcttctacccatcatagatgaatcccagaatccactttgtaaaccttttgtaataaaatgactgccgtaaaaccagcatgaggagacagatttgagctaaactcctgtctccttgaaaagctcaatgaaaagcttttcttttctcaaaaacccaatgtcatatttttggtttctagtgcaccgggcagcaagtccttggactctgtaacactaacacctaagctccagcctccatggtagctgacctggattacggcaatagcctccttacgtggtctcccaggtccttgagtttgttctcaacccagcagccatagagaccctgttaaataagtgagaccatgacattcttcatgctttctcctttcacagaaaaaaacaaagtttttacaatgaccttcaaggtgccaatgatctgcctcctctcctgcaaccctttttccctgcttttgcgatctcatctctggttctctgacctgcgcactcctctctagccagtgcccctctacctctccgtcaagcacactaggcaagctcctacctcacagccttcaggcctgcttcttccgcctggaaaactcttcatctagatagccgcagggcaacttcttcattgctttactgcatcttctaagtgaggtcctccctaaccatataattcaaattgcgtgccccctatttactcctctttcctttgttatcttcctccctagcactaatcattaccacatagcatatgatttatttatttatattgtttattgtctgttttccacaatagcagccaaagaattgtgctcactgctgtatccacagcaccttataaggtgccccatctacagtgcatgtctaatactttgaagttccttttcttctttcctttctctttctcatcagaaataaattttccccaccacaccattttatttactctattagaattgaattaaaattattttaagaacctcggctgggtgcggtggctcacacctgtaatcccagcactttgggagaccaaggcgggtgtatcacctgaggtcagaaggtcaggagtttgagaccagcctgggcaacatggtaaaactccgtctctactaacaatacaaaattagccaggtgtagtggcatgtgtctgtaatcccagctaccttgggaggctgaggcaggagaatcgcttgaacctgggaggcagaaattgctgttagctgagattgtgccactgcactccagcctgggcgacagagggaggctgtctcaaaaaaaaaaaaaaaaaaaaaaaaaaaaaatctcgtgctctaccaactgagctagctggctgggcttctaaattacaattcttttcatttcaaagatctgtggccaatgataggcagctaactttgaaacatatgccagtgattgtggcagtggagtccccagaccagcatcacatccatggtcaccaggggacttgtgagaaatgcaaattcttgctgggcgtggtggctcacgcctgtaatcccagcactttgggaggccgagatgggcggatcacaaggtcaggagatggagaccatcctggctaacacggtgaaaccccatctctactaaaaatacaaaaaaataagctgggcatagtggcgggtgcctgtagtcccagctactcgggaggctgaggcaggagaatggcatgaacctgggaggcggagcttgcagtgagccgagatcacaccactgcactccagcctgggtgactgagcgagactccatctcaaaaaaaaaaaaaaaaaaaaaatgcaaattcttgggcctcacctaaaagccactgaatcagacatactggggaagggtccagcaatgtttcaacaagcccaccaagtgattctgatacaagttaaaatttaagaaccatttcattgtttgggtttgtttataaaagcagtgctaggtcaaagaatgactaggtaaaatgaggtaatgaaagacagctggggaatgggatgaagcacacctgtattcaatacccacctccgctcttgggtgatcttggatgcatcacttctcagccttgaaacttgggttccttagctccaggggtacagaaccaaatgatctctaagaccctgacccatctgaacctctggttagtctatttttgaacttgcttctttcgttgtgttctaggactgtctcccaacacttacatctcaatacccccttccctctttgctttgtgttcctcaatacgaaagacctgtggttgctatctggatgtctcccatctccaaacatgttcccattggaaaaaaaacagtacacaatatgtgtttgctttactcacttatatattatatatgtgtgctgctatataaacatacgcaatatgtattcaaaatggaaattcaagctcagataataaaacagcgattctaacttgggtttaccccattgaataccacttatctgaactcaagacaggcaactctccctaactctctcctaaacactgacccgttttccagaaaaatactcattttctttgagagctaagcatactttctaaaaacaactgattaaataaattcagggaacatcatcctccttgtattgagcacttactacatgtcaggcactaagctcaatgcttcttacgtacataaatcttatttattatttacaggaatactgtgcagtaggtataattgtcccattttgcagatcggaaaactgaggcacagctaggttatataacctgctcttatttgcttagcagaaaataggtaaagctagcacaatggtagaacaacaagaaatttttgctacaacctaatgaaggcatttctaaggatattttccattaaagagtagctctttagcaaaattgaatagtattgatttctaatcgtagaatttcaatgagattttcggcaaggagttctatcctagtgccactcaatgtataaacctgaattgtttctattctgcatagagacagggcctaggattctgaggttaggggcatgatttcttaagtggggtctggcctgtctcatgacaccgccctgcttctctgggatctggtagtggtaggagcagagaattttcaacttgcggtcagacccagaacttcaggactgacatggttaattagaactactgtggtagctggaaagggagagatatatctggaaacagcccccaaattgcttacatcacatttaaaactgtccgtgtccctcatggagtagcttacgaagctgaaagcatgggtgctttttatgataactaattttctttatgattttccccacagttaacgtgtatctaagattcacatgtgctttatccaacacacaattagttgacataggatatggaaaaatctcttgttcgcatttgtttacttgatgcatcaactgacagaatgtggttacttctgtagtctccgaggagctgaaaaaaaatctcagaaatccgactttatgaagttaggttttccgccactgagaaatagcttcatgttaaaggtttgtttacaaggaattgctgtttccacttgctggagcagctcttaaacattttttttttttttctaaagtttttttttccaaccactaagtggatctaaacattaagtgtttctgaagttggttttccagctcctggactactattaacttctgctgggatgaaacagaaggctgctgcctccacttagccatccgtaatgtaagagtgtaatattttgaagaattttaaaaaagggcttactgcgcaatatttatatttcattcacatcagcacaggacagtgttgacacaaagttccgttgttgttgttggctgcgccttttttgcttccatctcacggcgcccaacttcccgctcccactgatggaagaagctatatctgctccaagcaagaggccaacctgataaacccagacagagcagagcccacagagcctctgcttcttaagaggaaaaattgagagatacttgtacaggtctgtttgaaaggaggaatgatagaaaactccttcctgaccttagaatcaaggcactttgagagttagatgtgtctccctctctcccagaagtgaggaaaatgaagtgtgctgtggttttccataaaaaatccgtatttcacacttgcttatgattgcaattatcagatattctcaaggaatttctcacattatgttccaaaaaccagttagagttagagtgtgcattggtaataatggtaaccatgatggataaagagaagtttgcagaacaaaactccagtaccccccaggcttaacaccttctgttagactccattatttgaatgcatgctcataatagatccccaatgagcaagaagatttttatatcactttctccctccttgtcttctccctgcaccacacatctgcattcacccacatgtataaacactcttctttttgctcagcttttcagctgcactcttccccaaattcacagccactggcaaaagttgctgttgttatcaaccataaataaatatcctcaaaagaccattatcatcttacgttgacttttaaattctgtttatatctgggaattcaggaaagagagagagaaaaaggaaggaaggaaggagaggaaagaaagaagagaaagaaaaaagaaagaaagaaaaaagaaaaggaaagaaagaaagactttatgaatactttctgtaggctcctctggaaccaagattagtccccaagtagtagagacagaatagagtaaaaaataagctatgtgtggctctcatgagactaatttagactttcatgacttcttttttcccttgatttttctttaaaactggaggcaaaacaacaaaaataagccaagctcagggctgatatcaggttgttttgattgtaagaacataaccttgccaatattgtaccaactccactctatgtaggcatgttgttctttggctcacttagagatgaagaaatgaaggttcatggatttttgagtcactggctaacccaccttcctccccaccactctctctgttgccagcatattcttcattcagcctttgtcccatgagggatataaatttagaagagaaacctgtaggtaattaacagtccggcatgtctgtcattcctttgataaaatgtgttgggtgtggtttctcagcatgcagttgataaaatgcattggtggtgttccatttcatttgactttccattagttttttttttcttttattttccaacgaggatgtgttaatggccagcttctgttttcaatcatgggggacatttctatggatttatttttacattttccaataagaaacatattctgatcctttaaaggttaaaagtaaagtatgaaagggtgagtgacagaagaaaagcttccctgctggcttaaattagcagaagtgtatgtacgtgtgtgtgtgtgtgtttgtgtgcatgtgtgtttgtgtgtatggctctttaggatctggattttctttctgtcttggggacaaagatcttgccatatttatgatttgtttagttactatatagctttaatgacctaagattggagaaagaggcacatcatttcattaatctctttgcttaagttccttactggttaagcatgaagaaaattccttagggctttgggcagcagatttgcaccttgaatagcaaaataggtttgtgtaatcaggttttatgtaagactgagcaggcaagggtgcaaatgaaaaggacactgcatgaattccagctcacagctttgaaaaaggtgcatcatttgaaaaagtcacccaggcttgcaaaccacaggagcctcagcaagcacatgggtgcagtgagcaatgagtaagaagaacactccctggagagaagctctgctgcccatctgcagagccctgacttgccctggaaaggagctcatattgtctagactttattggttattgacaatccagggcagtaggcacacagctctggtctacattagcatgcagatgtacctgtctttgaacttgagatgctgttcctgcttggaattctcttgtgcttcctttttcctatacattaaagacccaagattttgacctgtgccttgtacatccgttaaaattctcactttggcccatttagatatctgaacttaagacatgtctcttcttacactcagccaagtttagtcttctgaatgtcatcctcaaaccatctacatagattctgattcttagttttgtccttagcttagcataccacttaggacactgcttttattgccagtttaatgtccccttgatggtacttctgctgtgtgccattctagcctttccatgtactagtgtgattcatctccgggtcagccccttctcaggctctccatactctgtgagagtcccattcctccatttggaatgttgcacgcacaacatagaactggcttataccaaaaggcctgtcccattttcattcatcctgaaactcgaaccagaactctggtatgttcttcttgagctggaggaccccgtgttcttgcatagagattcctctttctgtttgccaccactgtccactgttgctatcactgcagcccaggccagcagaagatgtgcacctgtcactgctgacactaagcactgacaaccgtggtggcagacaccttttgttggttaatcaatagtcatcactaccactctcactttttatttgcaaacagaaccctgaattttgctcagaatgacagtaacccagtcccaggggataatttatcattttgtaacccaatcatagtaatcatagtcatttttgtcccctgtttattttccaagcttccctcttggccttaggacattgttatcatatgtattagtccattgtcatactgctatgaagaaatacctgagactgggtaatttataaagaaaaagaggtttaatggactcacggttccacatggctggggaggcctcacaatcatggcagaaggcgaaggaggggcaaagtcacatcttacatggtggcaggcaagacagcgtgtgcaggggaactgccctttataaaatcatcagatctcatgaaacttattcactctcatgagaacaacgtggggaaaacctgccctcatgattctattacctcccacggggtccctcccacaacacgtggggattatgggagctacaattcaagatgagatttgggtgggacacagacaaaccatatcatcatttaagggaaaatccactgaggaatatttggtaagtgctttgttgacactaaaagagaccagtttgtgaagagattttgtttgctccaaggacaagggtgagggacccaagtgtcaaaatttggaggtgaatgtcagaggctgcctggtctgaattccagctcccttgcttactagttgtatcctcccaatctagttacctcagcttttcataccttggtttccccttttatcaaatggagaaaattatcatggcatctatcttatagggttgttaggagaactagattaattaatagctattgagtattagaatgatgcttgggtataaaagcattttattggaataaaagcagtaaaggctgtagaagcatttgttaaacatatgaacatggacatctttcagggtgaattttgatttatttagcaaatggcatttttcttttatgaaactgacaatgataaaatgaatgatagggtccaacactagctaggtgaaggggaaatgcttgctatctgacagcgttttgcagaggtgaattatatattttctgacctaaaaatcttttctaaaaatgcaaaaaatattcaaagatggactagtagcccatcaacaatgataacatatactcacattttttgacatgaaagattgtatagggttaatgaggaaatgaggtaatacaacacgtcttacagaataatgacatttatacaaaatattttagtcaatgtattaaaaacgtgttgaaaatattagagaagacagataccaagtactggagaactggatgatttaaaacattttctttttcgtttatttgaatttttgttttctatgatggtcttgagtggctagttgtagaagagtatatatagtaagattccatttttataagacaaatatggtgacccattagtaataaataatgaaatctagatagttacacatataaaactgtctggaaggatatacaccaaaatgacaatagttgttacttctggattaatggtattataggttatttcattttatttattcatttatttattttatttattttttgagatggagtcttgctctgtcgcccaggctggagtgcagtggcgccatctcggctcacttcaagctccgcctcccaagttcacgccattctcctgcctcagcctcccaagtagctgggactacaggtgcctgccaccatgcccggctaatttttgtatttttggtagagacgaggtttcaccatgttagccaggatggtcttgatctcctgacctcatgatccacccgcctcagcctcctaaagtgctgagattataggcatgagccaccgggcctggcctcattttattttttgaatatttttactttctgattttactgcagttattatgtaacattctaggttttacaatttttttatttttattttattttattattattatttttttgagacagagtcttgctctgttgcccaggctggagtgcagtcgtgagatcttggctcactgcaacctctgactccagggttaaagattttctccctcctaggccttccgagcagctcggattacaggtgcccaccaccatgccctgttagtttttgtatttttagtagagacagagtttcaccatgaaagccaggctggtctcaaactcctgacctcaggtgatccacccgcctcggcctcccaaagtgttgggattacaggcgtgagccaccgcactcggccacaaaattttttgaaaagagctaagcagcgtatctttctggtacaaatggtcctactaatattattattctgttggtagccaagtaggaaaattctataagtgccagatatttgagcttataaagattccaacagaatcttccttcaccccaccaccagccccacacattagtctggagatatttatatttgctgccaaatatctgccccaaatcattctgtattgctgacattttgtcagattaatagatcccgagtgatatgaatatgttgattttgtggcagactgccaaagaatcctttttatagacaaaaatggatatgataaattatgtttcttgaggtcccgatgtttctatttaaagatgtctgtagatattcagtcccttataaaggtaccttaacattgctctttaaaagcattgtactacgtcttttctttcatgctttgagagcaaatcagggttatcctgggggtagacacttttgcccctgtcttgtggtttgtgaattccttggctcacctgtcagtgtaaggcattctcttttaattcaagttcattcatcagtctggggaaatgcttttctttttcagaggacctggattgattggttggaaatataatttggtccctgtgtttgtgctggatcacagatcagaaagcagtttcagtttgcactggctctcggacttctttactggtgaaattcagaagtgcagcaagagacaagaaaatcagagctgtttatacaatctcttttcttactttccttgagtgttttaaagaggaagactgggcctccaaactttgagcactggcagcaatactattgtatgccgtcaactcctattcctttcacaattcttctgtgcactggaagagaaaaaggcagctagcaggggtaagcataagtggaaggtatttctttgggtatcttctttgtgtgagacacagttctagatcttgtgcatttattctctccattaagcctctgatgtttcagagaaaactgatgtcgtaagacagtaacccacgtacccacagacatagctgtgatgattgacagaagcaagttcaaatgccaggcctgccttctttaaaccagaagtgttcctacagtaccagccacaggaatttgagcttatggcttacaggattcaaggtctcaaattcttcaccatgttgtctgtagatcaaataagacaatgatgatgatgatgcaggaggatggatggaggaaggaggatgaacatggtgatgataatagttcctacctcagtgcaattacattgattgcaaagcttaatgtgagcaacgacctataagcatctgatttctagtttgctgccttttaccctattcctattggctatttgccctagggaagagcagcttttataacttcactggcaggtttcctaattgctcaaattgacatgcaaataagctctccttgactcatcctaatgtctgtccttatccatacatcccagaatttgaggcacaaatcacattgcaggtctacatctttataaacttcttcatgaatctgccatgcatcctgatagcaatggcatgaacaacacctcccagattctgaaagtgtctgtttaaaaaggttgcagaagccaggcacaggtggctcgcgcctgtaatcacagcattttgtgaggcccaggtgggcagatcactcgaggccaggagttcaagacgaccaacctggccaacatggtgaaactctgtctgtagtaaaaatacaaaaaaattagttggccatggtggcacacgcctgtagacccagctacttgggatttgctgggaacctgagaatcactggaatccaggaagagtctgcagtgagctggagattgtgtcactgcactccagcctggtgacagagtgagaccctgtctaaagaaaaaaaaaaaaaggtagggagagggtttgcagactgaacctcattaacagactctctctcatctgattggcaggatgtgcatggtcacttaaccaatcccttaggcctgctcaagaggaaagatacagtttctgtcacagccccagggtcccaggcagcaaatgaataatgcttttccctgaaatggcttagtttcatgcttccctttcctcattttttcatggtgcctggggcctgcactttggaacaggggaagagctttgtcaggtattcctccatgattgtatcactatgttttagccattatattttagtcctagagcctatgatttgttctttctcgaagactccaagacccttctgagtctttgagagtcctttccagagggcgtggttgggacagagaaggggcaggacagggcttgaactgggaagcggggaagacacagccagccaccaggtggtagatataggcatctggcacttgtgggtcagtcactgtacaaccatctttcttgcacgtggatgctgagacttgtatagtgtacaagggaaggatggagagaagcaaactcctctcatgatgctgttactaatatgccaggtccagtgttaaattctttcatttgcttaatatcatttgtttctaccgctgcatgtaagttgggtattttatctatttttactggaaataggcttagggacaaaataatatgcctgaattctaactgcattaaaagcaaagcctgattagaatctttgtctctcagtcaaattcttaggttaaaacaagtgaaaacaaacaagatcactcataagaaatgatttggactgttcttaataaatgagaatgttcttaacaaatacatgataaatgtttgagatgatggatattccagttacctagattgaatcattatacattgtatgtgtgcatcaaaatgtcacatgtgggctggggatggtgactctggcctgtaatcctggcactttggaagcctgaggcaggaggattgcttgaggctagaaatttgagaccagcctgggcaacatagggaaactctatctctaccaaaaaaaaaaaaaaatcacatgtaccccttaaatatatacaattgttatgtatcagtaaaatttttaaaagtacctaactcctgctttctaaaggctacatacactaattgcaaagatggtcacaagacatgacttgaaaacaaacaatgtagagaacaagtgaatttgtaaaacacttttaccaattgaaaataattgggaaaggggacagcttgtgttattataggtgagctctttaatttttatttttgtaagttctttaggctaacttgaactaatatttgagtgctgacaaggttttggaaccgtctttgataacttcatatgagatatttgagaactaatcatttatatgcaaattgtagctgccaggttcttgagaattgctatattttcttaggtagattaaacttcaggaaaccattttcatagtattaactttcttcaaaagttcttttttcatagataataggaaagttaatttaaacccatccagtctcagtcaaattatcacaaattccaactgagtctgagttaatttctctgcaatgcagaatgtgtacatttatacaaagtggagacagaataatggagccatcagaatcagatacaattaaagcaggaaatacaataagttaaaaattctttaatttttcgtggataaaatggaaattctatcttgtgacatttgatgatttgtcctaatctaaacaggctgttagtttctgaaaagtgtaagaacgtgtcaaggtgattggagtttctgcattaaatttcaatttaagcataggctttggaattggacatgttgaaggaccagtccagcctttgccacttacgaacttgattgggcaagttgctttacctccctaagatttcattcaatcctctgtaaaacggaggagtgttgagaaacaaagcaaatgtattcagagatggttcagtctctagaataaagtatggagcaaaatgtgattattgttatcgcattattattgtagtgttatccatgtagctcagtggaataattttaatgacaaatatgttgtcattcattaggtttaaaaaatacaataaattccgttattttcttcttaaaaaaacctttttaaaggaaggtgtgaagagatgggaagagatggttttggctggcccttggatgggcagacacatgctgaggttataaaggaatgctaactcaccgcttttgttctcaatgaagcaactggaatacttgacaaggagaaatccttgaaagagcttcatggctcagttaaatctgctcaagtactagaaagaaaggcctttctaacatacaaaagacacatctgcagtacattttggttgcagtaacacaaactggacaagtccctggcccattcaatcactgaaattgactttccccttgcagaagttgaacattttccatgggttcttgtttggtatttgaatgggatggtaagtaagttaagctttctggcatgcaaaatcctcagtaatgtagggtgcaatttttacttccccacaaacactttagacgtttcttctgatgattatttaaaggaataatactacgttaatagaatattgttttctttcatctcctcttgacttgtttggaaaaagtaattttataccaaaacaaaacagaaaaaccaccaaatcaatgtaattttcctggttcaaccaaaaaaaatcaaagtacagtagtgaatatacaaaacatatttttcattggtacctctggaaatactgtaaaacattttcttcatcgtgccctgctatacatttcaaaggaaattggatagaacaacaagggaaagaaatgcacaaaacatatgaagagatataattcagaagggtacaggctacctgtagtttaaaatatttattcctggttgaatttcatgcctctggctgttctctctatcatgaagcgttccatttctgaaagtagaaagcaaaggaggaaatatctaaactgtaaaatgtcaaattgctttccaaacttgttccaatttccaaccacatcaagaaggatgtctgaaaagacaatcagcttttgcactaaccaaatacatatacaattatttatttttaaaaaattttccttgggaatgcaccatcaaagaacatttagggttattctgaggctatttcccttcaatcctttaaaaactagttttgtagctacagtatctttgtctttttttcctttaaaaattttgtaaatcaaataagccacaattcaatttatgtaggagaaaagtgcctacagttggatatattttatccattttctgggaataagatattggtgccctcccaaagaacaatttaaaaagaaataatcaaaaccgtacttttctcctcctaataccaaataggaaaaggattaaaccttgatgagatctattttaccaagatgtagcattcgtagatcttatgaagtacttgcttgcctataaagtcacttccatttcctaggacatggagtagaaagtcagagtttgcttgcatattttagaacttggattcataaataaattaacacattattgtgtgtacctcagaaaattcaaaggatttaaaagacttctaatgaattgtcaaatcatcagtatttttgatgagttgggtataaattcgagttacatgcaatgtttttagttataaaaattgttagaaactaatgagctagagtcttacatttggatgaatcatgtatttctttctttccttttttttttggaggggcagggatggaatctcactctgttgccaaggctggagtgtggtggcacgatctcggctcattgcaacctccatctcccaggttcaagctattctcctgcctcagcctcccaagtagctgggactacaggcgtgcgtcaccacatccagctaatttttgtatttttagtagagacgaagtttcaccatgttggccaggctagtcttggactcctgacctcaggtgatccacccacctcagcctcctaaagtgctgggattacaggcgtgagccgccatgctcagccatcaatcatgtatttctaatcttccattttatctcatctactaggttactagcctcattttctttgctttaaatttttgaggtgcctctttttcctgcctgttctctctctctctttctccgtatttgatatcaaaattataatatgcacaattaatttattctcatctctcaattatcattacattgcatattgtcacctatacctcatctctatccattgtgctactgttgtcattaatttacaaaaaattttatttacttactgaatttacttacttatttactgatttaattaactctacctatgatgtaagccctatagtacattgttgctatttttgctttagaacagtaagttacctgttctaaataaaaagataaaatggacttttctatctttattcacctatttaatatttccagtgcctgattttccaccagtatgagctcccctgagcctgaagaaactcctgtatatgtttggtactgcaggttgactggtgacaagtttgctcaagttttgtttatgtgaaatatcttcagtttaccttcctttttgaaggttctcttagctagacaaggaattctagagtgacaaagttttgttttgtttttccttccttctgccttggcatgttaacattgttgtttcattatcgtctggctagccttgtttctgatgagtgataatatagttattgccatcacagttcctctgcatgtaaaatatagatttccttcttagctgcttttaaaattttctctttatcacatacatatggccaacaatcatatgaaaaaatgcttaacatcactgatcattatagaaatgcaaatcaaaaccacaatgagataccatctcataccggtcagaatggctactattaaaaagtcaaaaaaataacagatgctggcgagattgtggagaaaaagggacgcttatacactgttggtggaagtgtaaattagttcagccattgtggaagacagtgtggtgattgctcaaagacctaaaaacagaaatactgtttgacccagcaatcctgctactgagtgtatacccaaaggaatataaatcattctgttataaagacacatgtatgcatatgtttattgcagcactattcacaatagcaaagacatggagtcaacctaaatgcccatcaatgataggctgggtaaagaaaatgtggtacatgtactacgtggaatactatgcagccataaaaaagaatgagaacatgttctttttggggacatgggtggagctggaggccatcatccttagctaactaacacagaaacagaaaaccaaatactgcatgttcttaattctataagtggaagctaaatgatgagaacatgggacacatagagaggaacaagacacgcaggggcttttcagagggtgaaggatggaaggagggagaggatcaggaaaaacaactaatggttaccaggcttaacacctgggggatgaaataatctgtacaacaaacctccttacacaagtttacctatgtaacaaacgtgcacttgtactcctgaacttaaaagttaaaaaaaaaaaagattttttttatcattttatttcagcaacttgcctagatgtgatttactttgtatttattctgcttatgttcatgaaactttttgaactgtgttaatatttttcatcaaatttagaacattttgatcagttcttcagatattttttattttctaccccattttatctctcatcttctgtatattggactgtttgatattatctcacaggtcactaatgttctgattatctttttaaaacatctgtgtcactattctttatttttggcaatttccattgatttattttcaactgtagtgatgctttcttattcagcatttatgctgttaataacccatacaaacaaatatatttttaagttctagaatttccattcagttcatttttagtttccatttctttcctgaaatactctatttattacactcatcttttcttataaattattttgtatctgtagttttttttttgtgcttatctgttaattctgatgactgagtcacatgtgattctcattctattgactgctcttccttgatttgaacttaagggttaagttttcttgttcctttgcatgtgtcatcattttttattgcatttgaacattttgtatgaaagaatggtggagactaaagaatctttaaaaaaatgatttgtgcatttctcaaggagtagctagtctcttcattctctttggttaaggtgaggggttgatcatttgaattcctcctaaagtggggctgggagccataactcttattagatttttttcatctgtggcaagcccaaccccaaagctccaccaatatcatcaccttttatggtgtcgaaggtgtttgacatacagtttcacctttagattccattctggcaggactttggaatccaagcactgcaagaatgcacaggactatgtgagctctctttgccctttagcccaccctcaattactgcttttttttttttccccacacagtttgcaactgggatggagctcttgtaaggttaaaggatttgtttttgtgtttgaagctctttttttcactagccctcactgttatgtaaggcagctgatttctcttcatccctccaaagggatcccttgtctacaatgcacctgctcctccttgtttgtacccagcccaggagccttcctgcaggtgtggaagctgctgtgactctagctcacttatggagggcttgtttctctctggaattcagttcaccaaagcttcctttagtccatcactcctcgctaagcccattcaaaagtatgctgggtttttgtttttgttggtttgggtcttgtcttttgttgttgtcaacatagcaggaatgacctttcatatctgtctttagttttttacattttgattaaaaattatttatgagcatgcactgccaacaacagtttctgagccatttcaaaaatcaccttctctgaatttcacatcacgtttcttctcttgttttctttttaaaaacatttgatctcattcactttttattttaaaggagatttattatcagttttgtctccagccttatttattcctttcaaacatttttgtacatatctgttcttcatatattcctgttactcatcaagactaaaatttgtaggctggatatattattcctgagtccaaaactcccaaatattatcttttattatattaacagttgtgctgtgctataaatgatagaaattttaacatacctacatgtgctaagttttgacatatttatacatcagtgaaaccaccacaataaaggaattagcataatcatcacccctaaagtgtccttgtttccctctacggattataaagggacaaaaatgatttcccttcctaactctccttccctcccacatctttagacaaccgttgatatgacttctatcctacagcattttctagaattttatacaaatggaattataagatctgtagtcttttttgactgacctcttttcttcaacattaatattttcagattcacccatgttgttgcatgtatcaatagctgattttattgagttgtagtgcattgcatgggtatatctcaatttgtttatccactcacctgtataatcacctttggattatttccaattattagttatttcaaataaagctgctatgaaaatgtggcacaaatttttgtatggacatattttaaatttatattgggtacatacaaagagtaaaatgactagatcatacagtatgtgtatgttgatctttctcatacactgccaaactgtttcatgaagtggttatatcattttggatttttaccctatacaagatttccaacaacaccacatccttaccaacacttgttatggttattctcttgttgtagaattcttttttttttaaactatttatttatttagagaagagtcttgctctgatgcccagggtggggtgcagtggcacaatctgggctgtctgcaacttccacctcctgggttcaagcgattctccagcctcagcctcccaagtagctgggattacaagtttgtgttaccacacctaactaatttttgtatttttagtagagacagggtttcaccacattggccaggctggtcttgaaatcctgacctcagtgatcagcccagcttggcctttcacagtgctgggattacaggcttgagccaccacgctcggcctcttgttgtagaattctaattacatgtgtagtggtatcttatcatggctttaattgtctacatttctctaagaaataaagatgcttagcatttttatgtgcttatttttcatctccatattttctttattttattttattattattatactttaagttttagggtacatgtgcacaatgtgcaggttagttacatatgtatacatgtgccatgctggtgtgctgcacccagtaactcgtcatttagcattaggtatatctcctaatgctattcttcccccctcccccctccccccaccccacaacagtccccagagtgtgatgttccccttcctgtgtccatgtgttctcattgttcaattcccacctatgagtgagaacatatggtgtttggttttttgtccttgcgatagtttactgagaatgatgatctccaatttcatccatgtccctacaaaggacataaactcatcattttttatggctgcatagtattctatggtgtatatgtaccacattttcttaatccagtctatcattgttggacatttgggttggttccaagtctttgctattgtgaatagtgccgcaataaacatacgcgtgcatgtgtctttatagcagcatgatttatagtcctttgggtatatacccagtaatgggatggctgggtcaaatggtacttctagttctagatccctgaggaatcgccacactgacttccacagtagttgaactagtttacagtcccaccaacagtgtaaaagtgttcctatttctccacatcctctccagcacctgttgtttcctgactttttaatgatcgccatcctaactggtgtgagatggtatctcattgtggttttgatttgcatttctctgatggccagtgatgatgagcattttttcatgtgtcttttggctgcataaatgtcttcttttgagaagtgtcgtttatatccttcgcccactttttgatggggttgtttgtttttttcttgtaaatgtgtttgagttcattgtagattctggatattagccctttgtcagatgagtaggttgtgaaaatttcctcccattttgtaggttgcctgttcactctgatggtagtttcttctgctgtgcagaagctctttagtttaattagatcccatttgtcaattatggcttttgttgccattgcttttggtgttttagacatgaagtccttgcccatgcctatgtcctgaatggtaatgcctaggttttcttctagggtttttatggttttaggtctaacgtttaagtctttattccatcttgaattgatttttgtataaggtgtaaggaacggatccagtttcagctttctacatatggctaggcagttttcccagcaccatttattaaatagggaatcctttccccattgctcgtttttctcaggtttgtcaaagatcagatagttgtagatatgcggcgttatttctgagggctctgttctgttccattgatctatatctctgttttggtaccagtaccatgctgttttggttactgtagccttgtagtatagtttgaagtcaggtagcatgatgcctccagctttgttcttttggcttaggattgacttggcgatgcgggctcttttttggttccatatgaactttaaagtagttttttccaattctgtgaagaaagtcattggtagcttgatggggatggcattgaatctataaattaccttgggcagtatggccattttcacgatattgaatattcctacccatgagaatggaatgttcttccatttgtttgtatcctcttttatttcattgagcagtggtttgtagttcccaaaaagagtccaggaccagatggattcacagccgaattctatcagaggtacaaggaggaactggtaccattccttctgaaactattccaatcaatagaaaaagagggaatcttccctaactcattttatgaggccagcatcatcctgataccaaagccaggcagagacacaaccaaaaaagagaattttcgaccaatatccttgataaacattgatgcaaaaatcctcagtaaaatactggcaaaccgaatccagcagcacatcaaaaagcttatccaccatgatcaagtgggcttcatccctgggatgcaaggctggttcaatatacgcaaatcaataaatgtaacccagcatataaacagaaccaaagacaaaaaccacatgattatctcaacagatgcagaaaaggcctttgacaaaattcaacaacccttcatgctaaaaactgttaataaattaggtattgatgggacgtatctcaaaataataagagctatctatgacaaacccacagccaatatcatactgaatgggcaaaaactggaagcattccctttgaaaactggcacaagacagggatgccctctctcaccactcctattcaacatagtgttggaagttctggccagggcaattaggcaggagaaggaaataaagggtattcaattagaaaagaggaagtcaaattgtccctgtttgcagatgacatgattgtatatctagaaaaccccatcatctcatcccaaaatctccttaagctgataagcaacttcagtgaagtctcaggatacaaaatcaatgtacaaaaatcacaagcattcttatacatcaataacagacaaacagagagccaaatcatgagcgaactcccattcacaattgcttcaaagagaataaaatacctaggaatccaacttacaaggcatgtgaaggaccttttcaaggagaactacatctccatattttctatagctaaataacagttcaaatctcttgcccatttctcattgggtttttaaaatatttttgagttttgagagattttaaatatattttggataaagaactttattgcatgaatattttgcatagatttttctcccagtcaatgtcttggcttttcatttgcttagcaatgtcctttaaaaagcagatattaagacaaaatttactcaagtccagtatatccatttttttctttatgcattatccttttaatttaagaaacatttgcataacccaaggtctcagagattttctctcacgtttctggtgattcattttacattaatttcctcaatgttgtaaattcaaagatgcatggcggattggttgagtcaggttaatgtttttctcgctaccttgaggtgcctcaaggtatgatgtgagaacccgtgcgattaacatcattctctacctagaacctatgatgttcttggaaaatgtattcaaaatgagttgcagttacagctaatatgtatgtctaactgaatggatatatattctctcacactctctcatttagctcagcggtagcaaagatcaaagtcaggtggataatgaaatttccatcatttcattctaggaataatttcacttaatcctctggtactgccaccagtgcactttcaatattaaattagaacctgaatttccaacaaaacttaatgaagatagttcttatatccttgtgggtggcttgcttatatataagaattaagagacctggcaccttctctttgctttcaaaggcagtaagaggagacttaaaatagtatattttcagataattaaaagtttaatgtgaatctgaaaaacttaaaagaaaaatagatgtgtccttataattttataatttacattcctttaactgaacacagctagttgtaggagatgtgcctgaatgtcttaaaggtcaaaataatccaattaaagagacatagatggattttatgtgagttcatttcaccagatatgaaatatgctatctcttatgttgcagtatgaaaatgttaaacagacatttctgatggtgacttaggatggacatggcaagggtgggtaagattaggcagttgtagtaactagcaggctgaatgccttccaaaaccttgccaggattcatgaggcatatgcaagtcagaggatgaaaaggaagtcaaggaggcgtgtgatattttattaagataactgcttagtaaaaaacattatttcacttcattttcactcacatttatttattcatttactcattcaattttcattgagtacttaggtttagggcactatgctaggtcttagaaaagatatatagataataatatactatttctgttctccaagtgcttacagacttagtttggatattaaaaatacatcaaagaagaaaaaagaaaaagaaaaatggaattcaaaaggtggaaatatgtggtctttctttttttatttttattttttattttttattttttaattttattattattatactttaagctttagggtacatgtgcacaacgtgcaggtttgttacatatgtatacatgtgccatgttagtgtgctgcacccattaactcgtcatttagcattaggtttcagtgcagtcagaattgttttgtttttgttgtttagtgaggaagttcagaagtttcttagtggagaaatgaatttgagttgcaaatctgaatgaacgaagaaatgaataaactatctagaaatgtaggataaagccctctaagccatgaggacagtatgaaaaaagtatagaggtaagagagcccaaagagtgtataaaaacaccaaactgttcaaatttagttgtattgaatattaaggagaaaaaaaagacaaagattgaaaaaactctgaaaatgttcttatgttctgtttatatgtactgtaccacctaatggagtgtaaattggctaaattgttttcaaaatatccatttttttaatggtttggatgtgggttacaatgcaaaaatcaaagtttctgctgaggttaaacaatttgcctcagcattgggcccagaatacttacttgaccatccaattggcatgaaccctgtaatggttaatttcacacattaacttgacttgactgggccacagagtgcccagatattttgtcaaacattattttgagtattttggtgagggcgtttttggatgaaattaacatttaaattggtagactgaataaggctgattaccctccctaatgtgaatgggcctcatctagtccgtttaataaggcattagcctgatcctcttccaagtaagagagaattctcctgccccatggcctttgaattaaaacatcagctcttcctgtttctgcagcagagtctggcatttgtagccaaactgggacactggtctgcagattttggacttgccagtctccataatcatgtgaatcaaaattccttataaatgtgtttacacacacacacacacacacacacacacacacacacacacacatcctgtcagttccctggagaagactaacacaaaccttgtaggattctgagttctcatatacacaaaaacgggatctctatgagccccttggtatgaaaaatagtggttaaaaatcagtgccatttcttccaggtaagagccccacttctgccagccaatgaccatttctcagtctctgacactccagcctggcaaaaggaaacgatggcttttgcagtgctaaggaaagagccttgttccaattgttcaccctgaccatttccatctcaaggccatatggttggctgttaaaaatattcgttgcactcacattggcaaatattttgtttctccaaatcagatctagagtcataaatacctgtatgtagcttagctgttaaaaatagctcaatagcatcctgcaaacagtacatacttcctgttgaaccagatggagaaatccgcacacaccaagccaatgtggagagagcaacagcagtcactggaacccagccacttatgccagaggagctggcaaaggtctgcatataaaatgtagtctagacctggtcaagcctttagctcttccaggaacccgagctcgaagtgaggaatttgggcttttattttccctagtgggaaaatacttagagatcattcatatgatactagatgattatgtgtaaaaataatgtttttattttccttctttaaactccttgcattacttttctctttggaaccctcagttcaactttatttttctaagtgcattcattcaacaaacattgagcatcctttgcatgcctataccatgtaaggtcctcatttacagtctctgaatgcaaattgatctatttcttcttggtcattgtctttctctgatacttcaaactacaaccttctggtcacttgactgcttcttactcatcttcttttcttttctctggcttgatgatttgtccctttctccctctctggtccaaaggaacttgacataatgtggcaactatttcctttacataatgatgggttgggaaggaagaggtgggttaactttcctaatagtcagcaactggaaggagtcacctctaccaatgtcaattggctcttctccttagtcttgattttttttttttaagtgtatggcaacagggaaaggtctgtgcctttactaacttttttttcaagtaaataaattaagaggaattataatggattcttcagatttttctccatttgtcttgcagagaacacctgcttttcttggtctgagagttagggaaaattctgtgtcccttgcctttgaatttgcagctaatcaaaaagtaggaaaaggagataatataattcatctaggtacttgtttgacaagcatgttccaagtcataatgaatgacaagtttttcatgcataaaatatttttttatatactcattgaatcccagaagctgaacaactcagatgatgttagatatagaaaatatttccaaattaatcagtggcccacacttttgccaaaatttagcagtagagtcattttaggacagggtctggcaaattttccctttaagtgttcagatagaaaatattttctgcttgtgttggctatgcagtctttattgcaaatattcaactgtgcagtcataaaaccaggcatagatgatgcagaaataggagggattgtgttctaattaaactttatttataaaagcagacagcaggaccactttggcctgaggcttttgttttatgacagtaagtttcgaccaataaaataaaatccatagaatatcatttagaaaggtatttcttaaaggaaatatgataaaaaaaaaaacatgtcttagagatacctagaatgaatgctgtaaatgcaggttcagagctcctgtctcagacttcaagtttgtggatgtctaacagagaaaacctggaaatctgcatattaataatcatccctggagaccattttgtacaaacttgagaactcctaccactacagagccataaatgcataggttagcttacccacaaagcagaaaacctaggaggcaagatgttgactgggtaggcactttcattcttgctgtgttgtgtttcttttaattcaaggtgtgattgattggttaagagaatgggtttggccgggcacggtggctcacacctgtaatcccagcactttgggaggctgaggcaggtggatcatgaggtcaggagatagagaccatccaggctaacatggtgaaaccccgtctctactaaaaatattaaaaaattagccaggtgtggtggcgggtgtctgtagtcccagctactcgggaggctgaggcaggagaatggcgtcaacccgagaggcggaggttgcagtgagcccagatcgtgccactgcactccagcctgggcgatagagcaagactccgtctcaaaaaaaaaaaaaaaaaaaaagagggatttgtgcatcaaagaaatatggcttcagatgcagaatatgtcactttctaattgggagaagtttgttggtgaaattgagctcatacctatgatatatctaggataatgtgaggaattaatgaatgaaagagtgaaaagtgtttagcattcttccagtttcatcgtcagcagtcactttgtaggagatattttgatgcggtcattatccacttctgtggttaataggagcttattctgttcaggattgtgaaaagagcatatatgatggtaagggaatgttcaaactgttccgcctctggcctagaaatcacataaacacagagtgagcacctttctcttttgtccttcaatgcgaagtgacttgatttcagattaaatgaaagcagagtagatttcctgatcgctcacccagttagacaaagaaagcagaaacagatgagcggttcatgagttaggcctcttaagaatgctctcttcacttatttcagaaataaagttctttaattttaagagaatatgtgtagaatgtttgaatcttagaatcataatactattgaccccttattatgtggcaggtgcatttcatatctcgccttaatccttataacaccaatacgtggtatgtgccatttatgccgcatcattggtaaggaaaataaaggtggagaatttgtgggtttcatcaaagtctatgcagttggtaatatcagaactgatatatgcacacaaactgccagtcccaaaccttctctgatatcatcattttcaacactcgctgtccattataatcaatcccagaagtttaaaaacagtaacactgcttcccgaatttgattcattcccagggattctgatttaattggtcttgggtgggaatcaggcatttgcatttttaaagaatagtctcccctgttactgcctattgtgtgtcacggttgaaaagtactgcatttcatacttgtgtgttatttaaaactgcatgttttcttcatataagtgatcctctctccttgtatgtgtcaacgttattaactacaatatctataaacatctcaaatgttaaattgagagcaagccaaatactaggatatttaaaaaccttgtcttgacgtcaagcatggaagatcaaatacactaactttgtggttgctagtaagcgttcccagtgtttgtctagctccagaaaaatcatcgtatttgttttttggcatctaaaaacagtcagttccacaaaccacgtttgcttttgatcaaaggcaattctaggtcactgactgaatgggatgggtacagctagtattcccaataagatggtatcatccactctgaagaaggtagacacaaaattaagcagtgtttggtgagttaatatgactgaactcaattagatacctggccctgttagacttttgtttttctagtctactttagcctgaagactcttaagaaagagcatgggatatgtaacagcaacctaagaattgaggaagggtgaacagatgaggtcatttttggcttctgtaaaatgctaatggcaagagatgagactttatctgaaagtgaagttctgggaacactgggatgtagagaaagtggtgtgaaactttgagctatatttagctgcatttggttttccttcgttatgacgtgggtatgttaactgatatagtttggctctgtgtccccacccaaatctcatcaagatggtaatccatatgtactgagagagggacctggtagatggagattggatcatggtggccatttcccctatgctgttctcctgatagtgaatgagttctcacaagagctgatggttttaaaagtgtggcacttactcactcttgctgtcttctaccaccttgtgaagaaggtgcctgcttctcctttgccttccactatgattgtaagtttcctgaggcctccccagtcatgtggaactatgagtcaacgaaacctcttttgtttataaattacccagtctcagcatctttgtagcagtgtgaaaatgaacgaatacattagtcaatctgtttaacaaacctatattgttataattcaactggagaaaataataacctacttctcaaagttatgagccttagttttggagaccatgaaggagacaggattggacttcaataagggatggttgttatgattatgcatatcatactttttactgggtgagatgtttatatgacaattatttgctgccttagctattggtttaaaataactaatttttgttaattatattgccatgacactacgattttgttaatatttttgttaaatagagcataaaggttttgagtagtaaaaaagctgaactgataatatttagagcatataccttagtctttcatatcttggattgatttaaaatattttaaaatgagattatcttttttcttcagggataatttatactttatttttggtttcctatgaaattcttttccagatttgcggggaaagtatctttgttatacgtggtagtcattgaacctgtaatttatttattcacactgaaaacagaaaatgtagctaatattgataatactttcataagttattgaagactaccaagaaatttaatgatggcacataaactgcatgttaatggttagagttttttattttgtatgagtatatatttgagtgaaataacattccagttccttgttagggaagaaactagaacaatcaaggtgattgaagattctctaaaggctttgcatttgattctattgaaatcaattatcctgagtgggtctgaagggacaattgtgcttcctgggttgtaggttacttggttttaacagctttattgaggtataattgatatccccccaaaattacatgtttagtgtataaatttggtgagtttgaacatatacacattcccatgatatcatcaaaatattaaacgtatctatcacctccaaacgttttattgttcccctttgtgtttttgcatgtgtatgtgggaacacttaatatgagatctaacctcttaacaaatttttgactacacaatgccatattggtgaaatagagggcactatgttgtacatcagatctctagaatttattcattgtgcataaataaaactttacacccattaaactactttccacttccccctcccttccagatcctggcaaccaccatcctgtcctctgtttctataagtttgactatttcagataaaaaaaattctactgtttgtaacaacatggatgaacccagaggacactgtgctaagtgaaataggcaacccaaaatgacaaatactgcatgattccacttccggtttccttttgtaggtggctcctagggtttcttgacctggacataactgacatttgtggttgcatgatgctttattgcagggaggaaggctgtcctgtgcattgtaggatgttcagcagcatccctggtctcccctctctagatgccagtagcacccttccccagttgtaacaacccaaaatgtttccagacattgctaaatgtctcttgcagggcagaactgcccacccactgagaaccactgtataaagggaggtgaactttcatccccagagaaaatgttcttctttactggttatgactgtttggaccaggagtatggaagtccttgtcccgaataagttcttaattagatgagagggttacatgctagttggaagctatagtataatggggatttaattcaaggttagaattggaagatggagagagagtgttatgctttagaaggagtgagggcaatgtatccacaaaaggcaatagttctgagtggatccttatctgtgctataagaagtcttaagagttcattgacctcatcatgtattatacacctacatttctattgtgattgatggagaaaccaacgttgtgtgtttagccgaattacctagaatgcacaggtaatgaaggcaggagtcacatctctcttcctcgtcttttcaaagctctggaagggtccacttcataaagtagtacttagtaagtatttgtatagaaaagtgaatggattaaaaaataaatgaattacaagggatgtaggtgggtcaggagatctgagaaatgttcttcctttgttttctcgctctctcacccaggctggagtgcagttgtgtgatcatggttcactgcagcctcaaactcctgggctcaagcaatcctcccacttcagccttctgagtagcaaagactacagatatgcaccaccacacctggctaatttcttaattttttttgtaaagatggggtctccctgtgttgcccagtcttgtcttgaactcctagtctcaagtgatcctcccacctctgcctcccaaagtgttgagattacaggcatgagccaccatgcctggccctgagaagacttcttattctaccgccagcttattgtgcaagtcacttcaccttcctgaatatcttgatctaagaaatggatagtgtgttaggtgatcttgagagtttcttcaggctgtgaaatatcatggctctgacaagattacagaatgtgttgcataattgtgatattaaaattatttggtaacttgagctatgaaaacttgtgtgtggagcaagttggtctccctagtgagagtctgtttcaccaaaagcgatcagagaatgttgatcatagttacccaaaagaacacatgctacaggtggatatgaaatgaggaatggacaaaaacaagctgctagagcacataacttttcattatgtatgttaggtatttctttctttaataagggtgaaatactgaagatctagtaaaaagagactattaaccaacaactaaattgtctggaatcaggagggagtaatctcatactaagaaatagtcctattcacatgtgaattaaacattaagttatttctttgcaggtattttggaaataagtaatacattttcaatacaccttttaagatatatcttgtggtagaaatagattagtcctaaaaggtgttattttttcctaccataggggctggttgttaacaatgctcataatattataacaagcatgttcagatgattaattaatgttggaaattcatctttcacccagactctaaaccagagaaactacttccacaggaagcctaattaccactcagataaactagtcagtaaaagtgacagaagttttacacccctgcaacttggtaaggtagaatacaagcagattgcaaaaaaaaaaaaaaaaaaaaaaaaaagctgcccatactctcagagcaaatccaggtgtaaaaccaatttatgtttcaagtgcctacccatgctgatctagccagggttatatagataatgttaagtgtaatttatggttgaggcagatttgtttggcaatactgaaggttttctgtgggaagttagaaaagatagaggcctccaaaagctatcacgactttaggaaaagtttggttgatgacaggtacagaagatgtggtttttcactcttagctaagagtgcctaagtaggcatggcatccaggattagctctatgtgtggcagtgtggtgacagtcacgtggtgatatggtttggttttgtcccacccaaatctcatcttgaattgtaactcccacaatttccatgtgttgtgagaggaacctggtgggaggtaaatgaatcgtggtggggggcggggggggtctttcccatgccattcccatgatagtgaataagtctcgcaagatctgatggttttataaaggggagtttccctgcacaagctctcttctctcatctgccaccatgtgagacgtgactttcatcttctgccatgattgtgaggcctccccagccatgtggaaggcataccaagtctcggggatgtctttatcggcagtgtgaaaatggactaatacacgtggcaattctagaggagcagagaatcaagctatagactttagcaggaaactactgggatggcaggaaaatgactgcagttctgatggcattgggaagagagggcaaggaacaaaagaagacaaaactcagcaaggctcagaagctctagtactggggcagctgttgaaaacaaagagcatctaaccatggtgtatggcactggagggacagttatgaactgagatcatgagggaaattctgtcaaaaacaaagcacagatcttcagaaatttccagactctagagatatggaaaagagagaagatcataagctggaatacagaaaaggacccctccagtatccagcactctggggctggcaggccaggtaaatcctgggaatataagagaccaggttggttagaatctggttgggcaagaaggatgactaccccagaaataatcaagagttgcagaacttgtttcactcaataacaaaaatctgctgagtctttactctaagcaccatggtaggctcggagacgataaagattaaatcagaaataatctcattcttccagcatgggctacatagtgatatcccatctctacaaaaatatttttaaaaaatgagtctagtaggcatggtggcttatacctagagtaccagctattcagaaaactgaggcaggatgatcgcttgatcccaggagtttgaggttgcagtgagccatgattgcaccattgcactgtagcctggctgacagagcaagactgtgtctcaaggaaaaaaaaaaaaaaagaaacatccttattcttgagaagtacatttaatctaaaaagggaggtggcagaggcataaatgtcaaatatcaaaatgctacagaggggctacctaacttaacttagaacaatcaaggaaggcttcctagaggaaatggcacttgaattaaaactggaaagaggattaataagagtaaagtggccagaagttgtgactcatgcctataatcccggtgctttggagggattacaggcatgagctgaaggtgaggatgatccctgcagctcaggagtttgagatcaatctgggcaacattgcaagatcccatctctatgaaaaacaaacaaacaaacaaacaacaacaaaaaagcaatgtggtggtgcatgccggtagtcccagttactcagaaggttgaggccagaggattgcttgagcccaggagattgaggctgcagtgagccatgattgtgccactgcactcagcctggacaacagagcaagaccctgtctcaaaaaagagagaaagagtaaagaagtgagaaagtactgtagttaaaagtgacataagcaaaggaaaaaatattgcaaataaatatgtgagatgtatatgtgtgcttgtgtcaaggaatgggaaagactgaaatttgttgggtatttggatataaattcaaggcaggaagtagcacacgaagtggcataaacatgaatggaatatacatagggggaatacctgaaagcaattattatgtcatgctaaggagcttggttttatcctatagtaggtgatagggaaaggttatgatcaaggtcattccttagatgtggctattgaagagtgtggaagacaatttgaggtcaacaaggccagaggcaaagagatcagttgggtggtagtcctcaaactcaagcttggagcaaaagaatgaagatgaagttgaaaaatagttaagcagttaggaggtagcataaccaggactatgattcaatgttcccttgagggacaaggctgccttacaatgggtatctggtttccagctcagggaacattagttccattgattgaaataaaaatgaatgaggaagaatgggttatagggtaggaaagataatgctgagattctcataaaaatcacaaaattgtgcattgaacagttgaatacaagagtataaaactcaataaaaagctcaactacggaaagcagatgtgagtcaatgagaaatgaataattatttgggcataaagtatttgtgatggttttttcaaactgaaggttttttggggaagagggtaaaacctctagcagtcctacccatattgaactttgctagctacagtggagagatgagtagttggatgcttattctacttggcagaggcgaggactggtgcaagagatgaacatcgcaatcatttaacaattataggtaaacaaatatcgatcagcaattataatttaacaattatagattgccctggaatatggattgataaaggaatgtaaatattattctaattagaatcctaaatgattccatgccccattgagtcctgcaaaaattgcatgatgatgatttggaagcaaatgtacttttcaacattgggagtgtttaagaataagctatataattgctgagcagggttgttaccatagaaatctctgctagagaacagagtaggtaattatttaatggaccattaagtaagagcatcataaattccggacaaattttaggaactattattttctgattcattgactttatataaaatatcaaaggtgtagagttaagtcacatattttaaaaatctaataagtcaaatttaaacaattgaataaatcactatgtgcattaaagcaggcttgtcttagtaagtaattacaataactttcaagattgttttccgctataagatttgctgttgaatcccctgattagcacagaatttggtacttgcttgggcactatatacatgtgcttttttctttttttctgtttgagacagggtctttctctgctgctcaggctggagtgcagtggtgtgattatggctcactgcagtctaaatctcctgggccaaagcgattctctcacctcagcctcctgagaagcagggactataggtatacaccaccatgcccaggcttctcttgaattcctgggctcaagcaatcttcctaccttggcttctcaaaatgctgggattacaggcatgagccaccaagcccggccactatatatccaagtacttggttacatgggacagatagagcaagaaacagctaagaagtcagctagaattgttcatgcattaggggaggccaggtataatataagctggagagagtacagtgttggtggaggggcctggtgggagatgattggatcatggggatggagttctcctgaatgatttagaaccatcccttttgtggtgttcttttgatagagttctcatgagatctggttgtttaatggtatgtgtcacctctcccctctctctctttctcctgctctgaccatgtgaattactggcctcccctttgccttctgccatgattgtaagtttcctgagcctcctgcccccagaagctgagtagatgccagtatcgtgcttcctgtacagcctgcagaaccatgggtcgattaaatgtcttttctttataaattacctggtctcaggtatttctttatagtaagatgagaatggactaatatagagaactgatatcaaagagtggggcattgctataatgatacctgaaaatgtggaaatggctttggaactgggtaatgggcagagacagaaagatgaggaaaaatttggaacttcctagagactttttaaattgttgggaccaaaatgctgatagtaatatggacaattaagttcaagctgaagaggtctgagatggagatgagaaacttattgggtactggaccgaagatcacttttagcaaagaggttggctgcattgtgcccctgctctagggatctgtgtaactttgaatttgagaatgatgatttagcgtatctggcaagaagaaatttctaagcagcaaagcatgcaagatgtggcctggccgcttctaacaacctattctcatatgcatgagcaaaaaaaaaatgacccccaactggaacttatgtttaaaagggaagcacagcataaaagtttggaaaatttgcaccctggctatgtggtagaaaagaatacccaactttcaggggaggagattccagctggctacaaagatttttatagctaaaatgaagacaaatgctgatagccaaggcaatgggcagaaggcatcaaaggcattttggagacctttgcagcagcctctcccgtcacaggcccagaagcctaggagggaagaatagtttctttggtcaggcctgggccctgcttccctgcacagcctcaggacactgcttcctgcatcccagccactccagctccagccatggctcacacaggcccaggtacatacagcctgtgctactgcttcagagggtgcaagctgctctttttttttttttctttaagacagattctcactcttttgcccaggctggagtgcggtggtgtgatctcagctcactgcagcctccacctcctggattcaagcgattcttctgcctcagtctcctgagtagctgggattacaggcacctgccaccatgcccagctataattttttaaatattttttagtagagatggggtttcaccatgttggccaggctggtcctgaactcctgacctccagtgatccacccgcctcagcctcccaaagtgctgggattacaggcgtgagccactgtgccaggccacaaactactcttatgatcagaaggaatatacagtataaaggaatttgtgtgacatttatggtgtcttttacatcatagtctatgaccctatattgttattataaagctcccacaccattaaataatggggacaatgcccattaaccagctgccttttatttctcatttggacagtaatttagttagtcaattggaaaagacatttacatttactttattcttcttcatggaaataaaaataaaagcagaacttctaacttctagaatcctcataaaaatggtactgactgaaggacctgaaggcattctgtagaattctaagataacctgtaatctcatatgtatatatgtatgtgtatatgtcaatatacaggactatctatgtatacatctatagctgcatctgtatgtctaggtctctatctataaaaccatcttctagaattcattacagtatcactatagacatttataagccaaagtggcagaaatattgaaataaagaactataatattggaactctgatcaacgttttactagtatagtcctttcataattctgtgcagatttctctagctagtatatattaagaaataagtcgtatttaaaccaacagaataagttgggaatccgtatataagcaaatgataactggaaacatattttttgaacttaacaattacatcagaaatacacttattgagaatgagctgcattcctggtaatgagaaggcaaagaaagattctgcaagatttggctctactagatctccttttggcaatttaaggtcattctctacccttagtgacttggaatttcagaaagtatatgtcttcttttcaaggagaaggaaattagaaggtacttagattggtttaatttgctttagttgaaagggcataaggacatccaatgtttacaaattcaccttcttttagtttccctgtgctttgcacagggaaatgaaatggactttgacattgtatagccttaatttgtaaaacaactcttctacttattatttcataataagtacttaaacttgccaatttttagtttctcattctttacaatgaagaaaaatatcttacaggattgttgtaagaattaaattaaattgaattaaattaaatagcagcgtaggaaccctgacacaatcgttgggtcataatcattctcaatacacattaatttcattaatcatgccttactccacaggaactacccttagtttattactcaaaggtgtttctatatggacaaatagaataagaattgcaaacagtaagggagaatttttatggacttgagaaagctgtaatgaggaatatgtggcagcctaatggagaactgaaataagtttgaatttttactacttatagcaaatatgttattataaggattagtattatcgtagatttaaataataggtttgcgtttatatatctttatatattttaattgtattcatgatcatcatctcactgaatcttcacagtaccctgtgagataaaattatcattctcattttacagatggaaaagttgagattcaaaggtgttaatttacattgcaaatcatatattctttatatttgtcaggaacaaccataaatgatttgaaagtggatatgtgatctgtgggtgtcctttcaatgaaatgttgagtgttttttgtaaaggaatctgagccttttatcgactcagccactttacaactctgtaaattatggaaaactgaaaggaacacaaatgattcttgtgtgtttacaggcaaatgaattttgtctggcaggtttataattgacttctactctgtagaatagatcattcaaatattatctgtttttactggtagatagtgatccactttgcatctattagcaaaattatttcagaacttgtgattacctgtatttgcatctgtgtttagattttcttttggactgattttaacatcttatgagtttcctcattagttaatgagttaaaaaattgacacaaatgtttattgtatatttttacaaaagtcataattttatccttctgaaaattatcttataacatacttgaattaaggtcttctgtttctaatcccagggtttataaatggaaattcaaaggagctagataaaccttgcctctgtcaactgtaaattccacaaaagattagccaaaacacattgatcaaacctattgcaataagaaaaaatgccactttgccaacaaaaaatttttacacatacacacagggagactggagaaacagaaaattgtttttattcacaaaggcatgactgtgtaagtagacagtacataaaaatgtacagataaagaatttacattaagaagctattttatcaaggtctctggatacaacaagtaaatagaataaaaaagattccatttataattgaaccaaaacaaaatatttaggaataatgtacaaaatgtctatacggaaagctgtaaaacatcagcgagagaaataaagaagacctaaattaatatatacatatttggaagagtcaatagtttacagattacaattcatcctaaacggatcaataggtggaatgcaatcactggatgtgctttctgaaaattggtaagctgattccaaaatttatttggaaatgcaaagggccaaaaataaccaagaaaatctcaaagaacaccaaccaagttggggatgcatagtttcagatattaagagtaataatgctgtaatgttttttgaaagtgtggtattggtgtaaggtagacaaatagaacaaaatgagaagcctataaaaagaacacacatttacagttatttgatttcttacaaaggagagactgcagtagagtttagaaagagtggccttttcagttattgggcccaagtcagtttggttttctaagtagataaacatctttcttctctgttgtcaactcctaaaaagaccatcaaagaactcactgattgagcaaagtttattagattctatttgacaaaagtcagagagaagtatttgggactttgggtttgggtctaagtggttaaagcaagacgtttcaagactaggaactgactgagattaggaaaattcagattcataggagtttaggattggtcaacacaaagacaggcttgaaataagtctcgataaggaaactgatttttgatacatgagctgcttgcgctgttaagaaatcaattatcctgacagaagaggtactctcgtacttaaagaaagtatttttcagggagaaattggtttgcaagaattccctggagcaaatagttacatcacgtcacaggtgccctcagttctctgtccagctgactaactacgtgaatgcaattgtctctactccaccctctacctcactaaagtcactgtacacaaaagtcaactctagatgaaatgtagatctaaatctaaaatgaaataaagcttctagaagaagaaacaggaaggtatttttgtgatcttcaagttggcaaagctttttaaaatcaggcccaaaaacctccttaaccataacggggaaaaggtgggtaaatcaacctacattaaattacaactctgttcattcaaaataaaccattaagagagtaaaagggcaaaaatacaatagaaaagtgagaataaggtttgaataagaacttgacaaagagggcattcaaatggttattaaagctgagaaaattatattttataattcagcaattatatttctctaagtatatacccaaaagatgtacatacacatgttcaccaaaaaatgtatatgataatttttattaatagaagagtctataaataaagttgctgtatatccatacaatagagaatgaataagcatgaacaaattattgtgacaggcagcaacgtggattatgcctacaaacataatgccagacaaaatgaagccaaacccaaaagaaaatagactaggtgtttctcattctataaagttcaaatgtaggcaaatttcatctatgttattacaactcagaacaatgttgacctttggtagtaactggaaggggacatccagaacttctgcaatgttagaaatttcctattttgtgatctgagtgctgattatacttacaggcttattttgtgaaaattcagcaaactgttttttctatactttcaatgaagtttacaagaaagctgtaaagaagggcaggagaaagaagaagcacataaggaaaggcagaaaggaggaaagaaagactaaaggaagagttactttctagggatctacaatctaatagtcattatcatgacatggaaaacaatatggaaaaagaagaacctaaaccgattccttttcacagtaaccaaaacaaattgaagaatgagaatggtaatctggagtgtgtgtagcttgttcacctctttcaattcttagaattctccactggaaattttttcttggtgacaagcttagttcttcatacctcattaaagaagaatttacagctggatgattgctatttctcttcacatggagccaaatttagattttaattgacagcccagaccctgttctctttatttcctatgtgcaattagaaagcgagagcatatgttctgaagtcgaagctcaggaatgggatgtttggagttcctaaagtcattcttcactctgtgaaacctaaattcgtcccactccctcttgaatgcacatgtgcagtggaacatttgctgcaaggtgactctaacatgagcttcagctgacatcctttctgctagttccagaaatacaaattagcctgtgttggcagaagattagggactgctctttaagcagtctttcattctgcagttttattttccattcatcttgccaagagagtatctttttccagaagtttctcctctgctctcccctgcccttttcttcttttttttaagctccttttttctctcccagatccaactgtatctttactacagcctcttgctgtttcttatcctcatatttttatactgccaattgctttcctctctgtacttcgcttattttgaattttttggccagtagtaataccatataaattaagaacaatccatcaagtgggtaaattgcctgttttgttcaataacattttatttaccatttagattttttttttttaatttttgagacagagtctcattctgtcacccaagctggagtgcaatggtgtgatcttggctcactccaacctccacctcctgggttcaagcaattctcctgcctcagcctcctgagtagctgggattacaggtgcccaccaacacaccacgcacattttttcaaatgtatttttagtagagatggggtttcaccaggtttgtcaggctggtctcaaactcctgacctcaagtgatccacctgcttcagcctatcaaagtgctgggattataggcatgagccactgtgtctggccaccatttagatttttttgaacgctttacgtttgagatgtgggatattaaactaattacaatcattagcaaatattgattacttatatcctgtctataatgacagttttattttcccttaagtcatagaagtatcaataagaggatacaaccatcttccatattcctctaccttttaaatttagcttctccaagaatatactattttataacatctatctaggaagcctaagtataattaacccattacctaatgcattcgtgtgtctaaaggaagctctctttggccttagcagcagtggaatgggaagaagctggggccaggtgtgctactgactctccattctcatttccttctgattctgccgtagtagctcttgatttttcttgtttacaattgttgagctttggacatctcttcttcctcttcctctttctcttcctcttcctcctcctcctcctcctcttcctcctcctccccctccccctcctcctcctcctgctcctcctcttcttcttcttcttttgagaggtagtctcactctgttgcccaggctggagtgcagtgacacgatctcagcttactgcaacctctgcctcccaggttcaaccaatttctggctcatttttgtatttttttcaatggagactgggtttcctcatgttggccaggctggtctcaaactcctgacctcaagtgatctgcccaccttggcctcccaaagtgctaggataacaggcatgagccaccactccgagctggatgtttctttattatcaaaggccttgccacttatgcacaggaaggatgactgtgcagtgctggggtctgtggttgacctgcgctatttggatatcaccagggagggaagaaagaatagcagcttggggtcctctggaaactctgcctaaggacctagaacccaggcattcattaagactttttgtggcattagctcacagccttctagtttaaactttttaaaacattcttctttttgttgttgttttctatgaggttaaaatatccagacttcaccactaaggcattaatgtttgctcttttcttgatatgaagtttaaatgcattcctattcttgaacacacaatatgtatctttctgaagttatgggcaagttcaataacagctctctccaaatctttgttttatttccactctattagaagcgattaaggcttctatggagttctcccaaatgactaacattttataacttttattttcctttacatgttttatttgtagtaccacttgaacctaattcagttataaagccaataaaagggggatggatttggatttgggcatacttggctagaattagaggttctagtcttaatgtccattatattttaaacattaatgagttatatgtttttaatctggacaagtcagtggcctagaaattcagggaattgttagaattgaaatttcaattctctatttatctgttaaagggtttctattcattttcagggggaaaaaccttagttaagatcataacactaaatgtaacaatgtcatttgggttccagtccgtgagttgtaggagaaaggagtttgccgtccattttttttttttttttttttgtttagttctatccttggaagaaggagaaggagaaagaggaggaggaggaggaggaggaggagaaggaagaagaagaagaagaagaggagggggaggggaaggggaggagaaggaagaataagaagaagaagaagaggaggagaaggaggaggagaggggagggggagggggagggggaggaggaagaagaagaagaagaagaagaagaagaagaagagaagaagaagagcagcagctccatcatacttgctccaacacagtgaaatgttacaatagtctaggatcttattcctctcagtgttgcttttagaaaacactgttgtaaataaacacaaattctctctccaaacaacaacaaaaaatattttttaagtaaaatgaaatgggtgtgaaataggtgaatgagcaattgtccacatgaatgcgtctgttcaggggtgggctctggttagagaaggaagcagatgaaaatgctcacctggatttagagtgaatcgttttatgcttatctattaggttggtgcaaatgtaattgcgagttttgccattacttttaatatgacaaaacctgtaattatgttttcacaaacctaatctattacctatctcttaattttccagtttctctaactttcatcctccagagggacaaataaatggtcacttaatgggagtctagaaccatatacatcattgtaattctgattaagctttacttaaaatgtgcttaagttttcaatgtgtgaagcttgagagttacagttttattaataatttttacaataatattttatggctagtactttgacatcaactgaacatatttctacatattatatcatttgagcctcaaaacgatctggagatgtgggtaaaaagcaggtacgatgatttatatcctaaaaatagaaacttgagggttcaaggtgttgtgacttttccatctccaaggtcacatatctataaaatagtggcctatgtgttagcattttggcatcttttcagtattacttgctccagaattattaactttagaaattttaagaacatttttaaaaattccatttactttttaaaattatccaccccaccaaaaaaagaaattctctttgaccagttggtaattgaattcattacctggaactaaccagagaaaaaacaaaactaaaccaaaccaaaccaaaccagctgaaagaaaaaaaaaaaagaaaattgtaactctctttaactgaattgatttaagacataacaagggaaatgaaaaaattggactatcctgacagataactttgtttgccaaactgcaggcagatcaggatctaagaggcttactcttaaactcctggaaaataagaaaatgcttccaactggaattttttttaaaatgactttttaaagtagggcactacagatcagtgagatggtacaaatacaaaagttaataaagagactatcattgattggactctaggcacacttaccaacatatctaacagagctctatgtgtgttgatagtcattgttctgaccaatggtgcaaaaatattatatgccctccatagtttcaaatgttctcttccagtttatgatttactaaaacccactgaagtccatggggctgcagtataaacacagatatataaacatgcatgcattaaatgtcttcaccagcgacaaaaatgttaaatcgattttatgagaagttggttttccagccactgagtggctgtaaatgttaagtgtttttacaggttgttgctttcccagctgctgagctgttttaaatgttatctgtcacacgcacacacatatacacatatccttgctttgccagctgttaatcctctctgcacatttttataaagtttttcccccttcttttacttgctaaatctatttatattttactcacataagcaagtgcaaaattgtcttggcatcacctaacttttatttttattgaatttttttaactacaaataaaaattccatccctgtttcagtgctttccagagagtaggggctgtagttataatgaatccaagatgagcattacgagttcatctcaaaatttagataccacaaaagcactctacttgcggtatgctcagtggaaacactgttcttgcggtatttccattggaaatattgtacttggtggtatttttcaatggaaaaactattactgtaggattactgagtgctgcaggaaatgctggctggagtcttctaacaaatggcccatagaagagggaagcaagacagttaaagtagccaccaatggaagccaggagtgatgatgatgatgacaatattttatttaagaattccaaattaaccccagttgcattatctatgaggaaagggaggaattcatttctaataaggaaaagttttgtaaaacccctaagattaaaatgtgagtgagaaactagactgatagcagaataaaaataataaaaacaaaagacaagtgagatcataagccattttgggagggggaaagggggatgtgcattataactctctcctagtgtctgttcacagactctagaaaaaaagtgcccaagggaaaaagacaccaagtaaaagctcaaaagaaaaagacatgataattttctgaaggattttcccaatcaagttggaggctggattgtactgaagtaaaccagcttaaaataattacctagctctctagtctgtcctgagtctggctgggacttgcttttctttattacccagcacagctcagcaggattctctgcttctgttgggcagaattttcacaatttcccactgatgcctggcttttttttttttttttttacattgactttctgctcatgatcatcctccctgctgggatacccatcacttatctaaatccctcccaggctaccttgaaggtcaaagttcaacttatcaaatgaagcctttcatggctcatccttcagccttcatagatcaactactttaaaaaactgtcaaatagagaggtacttctccacacttcagcatttaatggtgtctttatggtctgtgccttacaagcaatattgaaatcagacactgtgctttctatttctttgtaatttacagcactgagaacagatctgaacactgagtaaatgcttattaactagtaattgcttacctgaggtaaagcaaatatgataccttggtttctctgaatcctcattgattgattattttagctataatagtatagctgttataacacaaaatcccccaaattgcagagcttaaaacaataatcacttacttctcattcatatcatatttctgtgtgggcatttctggtggagtggctcttctccaagtagtgactcagggatccaggatccttccattgtgtggctttaccacatggcttccaagattgcccagagggtggtctctatcctggtcatctggaaagggaaaaagagactaaaggactgtgtgtataatgtgtacgtagaattgaactgaaagtagtatttgtgactcctgcccatgttttattggtcaaaactccattgtatgatgtattgggttgacttttattcccccagggtcatatgttgaagtcctaactcccagtacttcaaaacatgactgtacagtacttggagatagggcctttaaagaggtacttaagttaaaatggaagttattaggtggaacctaattcaatataactcgtgtcctgagaagaagaaatttagacacagataggtacagaggaaagacaatgtgaagacataggtagaagtcagccatctacaagccaaggggagagaccttaaaaaaccaaccagcccttccactaccttgatctgagaattctagcctccaaaattgtgagaaaataaatttctcttgcttaacacagtatcagtctgtgatactttgttatagcagccccaacgaattaatacacatggcaacatttatctgcaagggaagctgggacatgtagtcttgctgtatgtcgaggaataaaaggaaacaggttttgctgaacatacagcaatttctgccacagtactagaactgggtagggtattaggggtcatctactccaatattctcttttctttctgaagatcaagataaagtccgctaaatgaactgactcactcaagaatcctctggatatgtagtaacacctaactagtgactgcattgttcatctaattaattggatcaaaaatttgctaatgattattgtccaccaatgttccacctatccccctaccctttaatgagagccacctagattggctatgtaattgtgaggcctaatgcaacaaataaaatagagaaggagagagagagagagagagagagagggcctttgttaaaattaagaattccaaaaatagtgacagtagatcattagaccatgcacaggacctttctaactatagggctctgtgtgactgcacaggttgcatgcccatgaggctggccctggtgccacatatatcaccaacactaccactaccatgggtcttgatggcttgaaattgacattagaaggttggagagatatttgaagagttagtccacccccagtccatgttggatagactatcaataagaggttggtgatgctcagtctaaaacattggtgtgtaaacataggtctgctttctgtcaccaaacttcttatgttagaatcacatggaggagttttttggggttttttgggttttttgtttttgttttctgagacagagtcttgctttgttgccaggtggagtgcagtggcgccatctctgctcactacaacctccacctccctggtacaagaaattctcctgcctcagcctcccaagtagctgggcctacaggcatgcaccaccatgcccagctaatttttgtatttttagtagagacggggttttaccatgttagccaggattgtctcaatcttttgacctcgtgatccacccacctcggcctcccaaagtgctgagattacaggcgtgagccatggtgcccggccatatttttattttttttaacatatagagattcaaatgaaatttattgggacaaaggtaagatattcttttcaagtgcccacagctgattctgttgcccaggccaggtttggacagtacaggttataacaacttgaaatcttatgagtctgttgactttaacctacctaacacccccccaatttgtcattccttactttccttactcagagaaggattttatctgtagataatatttctttggataagatttgagaatgttaataagtcgagatttcctcccaaaagttctagttttcaaaattaattttctggtatccatctcaattgtccctaacttccttccgtggttctctctggtgaccttatgaaagatgtagtgtgttcttgttctgtctgtattctgtgtcatcaaaattattcttaggaaaaggtctagtaaatgtgtttataataaaacattaaagacagatatgaattgatatagcaattcttgtcagaatcttttctttccaagcgataaaaggatttaagccaaaataataaatctttcattgcagaatttcaggtactgatgaaattttaatgcgccaaatgtaaatgttgtgaagtttttattttattcactcattgacttatttatatttttaaaatatatttaattttaaaagagagatttcattcttaagtaatccctacatttaaggaaatcttattttaaaaaagtacatatacatattaaaagaaaatatagaaagtgctgttcatgtatacttgtatttattctattttttatacctatctgtctatctcttatctattttctatctatctatctctagggaaacccaggaaaagaagtaacgaattctgtctgaaaccaacagaaaagatgtagacagtaggtgtgtggtttgaactgaatcctgaggcagcatggtataaattttagtgtaaaacatgaatgtctaccatttgtttagtaaaatcagtttggggaaattacttagttcagggtaaacactctggagtcagactgctggggtttgaacccagctccatgactaactgtatagcctggggtgatttatgtaatatccctgttccttatttcttcatttataaaatgagaataaaaataaatagatctgaccacattggttttgtgagaggattaaagaattaactcatgcaaaacattgagaacagggcttctattactattataaatttcgttataacccagtttattctctctaagatgagaataataatatatgcctttaagattgatctgggcattatattgaataatgtatgcaaaatatctagccagtgtactctaaatagtaacgtcgactcagaaaacattgtttactcaatgattcactcaagagacattaatgtaaattacatctatatatattaccttttccttttacataggttaccttttgttgattaatttaactttatacagattagtatttgagtgctagaaaaagtgagcatagatagcatatttagtgttttcatgtcctagaattggttattttgcttttcattcaaatatgtctttatgattacaccaaacaattcaaattaggctatctgaatcagtacaccatgaataagtatataaaagtgtttcctctctaattaataacctttgcagttttcagctgaaagatatgatgacagaaaaaaataattgctcgttcaggctcttttatgtttttatatcaattttgggattgttttttctaattctgtaaaaaaatgatgttggtatttctatagaaattgcattgaatctgtggattgctttgggcagtatgatcattttaatgaatgtaaattagtacagcttctatggaaaacagtatggagatttctcaaagaattaaaaatataactaccattagatcgagcaatcccactaccaggtatctacccaaaggaaaaagatacctgcacttgtatgtttatcaaagcactattcacaatagcaaaggtatggaatcagcctaagtttctgtcaacagataacagatagctgtattagtcaggattctctaaaggggcagaactagtaggatagatgaatatatgaaagggagtttattaggagaattgactcacacgatcacaaggtgaagtctcacaataggccggctgcaagctaaggagccaggaagccagtgcaagtcccaaaacctcatcagtaggaaagccaatagtgcagacttcagtctgtggctgaagacctgagagcccctgacagatcactggtgtaagtctgagagcccaaatgctgaagaacttggagtctgacatttaagggcagaaagcatctagcatgcgaggaagatggaggccagaagactcagccagtctagtcctttcaggttcctctgcctgcttgtattctagccatgctggagctgattagatggtgcccacccagattgaggatgggtctgcctctcccattccactgactcaaatgttagtctcctttggcaacaccctcacagacacactcagtaacaataatttgcatccttcaatctaatcaaattgacactcaatattaaccatcacaatagaataaaactgtagataaagaaaatgtggggctgggcatgaaggctcatgcctgtaatcctagcagtttgggaggctaaggcaggaggatcaattgagctcacaagttcaagaccaaactaggcaacatagtgagatgtcatcccaccaaaaaaaaaaaaaaaaaaaaaaagccatatgtggaggtgcacattctcacttgtaagtggggtctaaataatgggtacacatgtacatggagtgtgtaataatagacaatggagacttggaagggtgggggcatgggatgggggtgatgaatgaggaattacttaatgtatacaatgtatattattcaggtggtggttacactaaaagtccagtcttcaccactatggaatctatacatgtaacaaaactgcttttgtaccccttaaatttatacaaaattaatgatatggtttggctgtgtccccacccaaatctcatcttgaattgtagctcccacaattcccatgtgttgtgggaggcacccggtgggaggtaattgaatcacggaggtaggtctttcccttgctagtcttgtgatagcgaataagtcttatgagatctgatggttttataaaggggagttttcctgcacaagttctcttctcttgtctgccgctgtgtgagacatgcctttcactttccactgtgattatgaggcctccccagccatgtgggactgtgagtccattaaactctcttttgtacactttcttttgtaaattgcccagtctcaggtgcaaatatatacacacacacacactcagagtgaagagggtcaagcaatcaagcaattctatagctctctttagtatgcctttttcagaattatttttagtcagtacttatgtctcacctcattaaaaatatacatacatgtatttattagccaggtgtggcagtgcacgcctgtagtcccagctacttgggaggctgaggcaggagaattgtttgaacccgggaggcggaggctgcagtgagccgagatcacgccactacactccagcttgggcgacagagcgagactccatctccaaaaaaaaaaaaaaaaatatatatatatatatatatatatatatacacacacacacacacacatacacacacacgtattttatgtagcttgaagagagacataaaagtaaaaataaataaaaaccaaaaagtagacaaagaaaaaattaaagtggcaaaataagaaaaagtaaggggttccattgatgcatgaaatttataccgtaggtcaaattatactatagttaaaggtggaccacaaaaaatggttctgagattcctagcaggcagaccaaaaaggaaaatcgatcagattcatagtgtctatcagataaaagcaagcatgtcaaaagacagttttattacagctcaattgtttcaccatccaaacactttctgaactcacagacactttacctaaacctcttttctgcatgcatctctctttaacttatgtttaggcatcttgatccactacaaaaccatgtgaaccataaagacagaggcctcagcatattaattttttataacactgtgcttcacacaagacaggatttccattaaatgtttgcacaataaattaatcaatgacattttaagatgtgtgtcaaaagaaagaaacctgtttgggtgaacttcacactttcaaaacacactggctgggaagacaggctgacaaattgtgttgagaaaaatgaaggttataagtggatttgtgtgtatatgggaagaattattatggcaatttattatcattttcacataagggaaatagaatggaggggttgaagaagatagcttgaaaagaagggagaaactattgaatacagattcttcattacaaatttttatcaaaatctaaatctcagtagaataacaatctgaagtcactgggcaaatggtcttcattcactttaaaattaatgattatattatttttaagttacaagtttcccattaatttaggtgcctttaagtgtattccaacaatttataatgctcgctaacgcattttattgtatccaaagtttagaagtatctagacaaatcactgtatttgttatatggtaatcggtattatcttggtctttaattccagaattctatgtaacacttatctaagtgggggttacattgggtatttcatgcgatttcctttttatttgtatatttattcagcaagcacttactattgttcacaatgtgtcagcactgtgggtgagaaagaaacatggtaccattaatcaaggaacttacagtcaagggggaggaataattacagcagaggagtgcatatttgtacccagcaaggaatggtgcagagtcctctaggagatggagatcataaaagaaaaagagctaacttcttggattgatctagggaaacatggtggaggaggtggcattagatctagtcgtaaataatatgtaaacttgggattcctattaaagggcacatgtggaagtaggggggcgcaaaattgttggatggaatttaggctgaagcatcttaacctcaaaccaaagagcaacggaaacagttgtataaggggagaggaagggaagagaagagagtgttaaaatcttgatgaaagggatagcaaaattggagtaagatatgacgcgaattatcgatggaggtgtacaggaaagaatgcaccacatttcaatttctttcaatacatccggcagaacaatgccaactagaagtcgaagcacattgtccagaataggcaaatgtacagagagagaaggtagagtagggatagccagaagctggagcgagggggaactagggagtgactgctcatggatatgttttttttcttgaggtgattaaaaatgttctgaaattaggttgtaatgatggttgtgtggcttttgcaagtgtttaaaaagtcatatattctccactttaaaaacagttcccacttaaccttttcatatgtgtttagatatagcttgttcattggttgtccttatttatgctctgttttgatttagtattggcccatgttttatgctttatgtcctcctcagattagcaatcttgttttgtatcacagttttgatggtggccttgctccaggatactacttcaggtcttgttgctattatttctactatggataacaagagccccatcctagcagataggacactgccctcctgaaactattctccacctggctccaagcctgagggggcaagggaattatgcagatacattcaatcagagtcatgaaaatcaattaggcagcattttagacgggttataaattgctaaggcttaacttagaatggggtaggattgagaatgaaaaagaaaggaaagagatcttgtgcaagaatgggcagggtgttgtttcagattacacctggaatagagtcagagtaaccaaagataaatcacattttaattcccaagtgacacaactttttgtcacagttccttggaatttctactggagggttatatattatgatataacactttacacagtgcttggtatacagtaaatctaggtaatggttttggcaaggattttatgtttatgttttgtttttacttcttcccaggagactcctgctttcaagtcagttcattaatcattatcattctcatctacaggaggtaggaattagtatcctcattttgtaaatgagactactgaagatgaatgagattaaatgatttgcccaaggcctccatgttggactgtgattttgtaaaaaggcagagcaaattctgttagttctacataggagatgggagatcacagcaggttgatagaatctagaaggggcaaaatggagatgagaacttagaagtagaaatggaaacaatgaagatgtcaagaaaggcaaagtcaagacaggtgagagcaagacccagctttggggatttggattggcagggccaaccctgcaaaccagctcagccagaagaggggcaaggcaccttcattatgggtcaatgctttggagtttgaagggggaaagtggagagtccctgggaacctaagcaacccaggaagaagagggtcaacgatagcagatctcatggaaaaagtatttatggaagtatgttttttacctactgccattgtgaattgtctgacagtttcaccatgaggtacagagcagcaggaaggctactcagaatcaatctcatttctagggtgaagactcttgtatgtcctgatgggatgactttcatagaagaacagcctgcagataataatgggttacaataaacttactgctcctgaaagaaccagcaactagtttgtcctaaaaccaatcttcccttctgataagtcccaatgccatgtaaccattggatacttatcatttgttatataatgagttacgttttcatatatttatgctaactctctaacttgactatatattctaccaagatagaagtaaatattccttcctcattttcctatggatataaatttatacattgtacctatttaatcaaatacttgactggttggatgcctgcatcaaatgcagacatgactccccccaaaatgggctttgtaggagcctatgtggcaaagattagggttcctgggaagccgaatctgagatgaaattaagagctcgttatgttaattaaggtgcatccttggattcaacacctctcgagttaggggaaggaagcagacagggcagagaaagaagttgagcttccacggagacccatcacagcttcagggaatctcatagagatttctagagctagaatgacccttcagcattttctcaggttgatttgcaatgaacaggcccttacactccctccttgatcagtttttggatgtgggctccctgcaaagggatgtgtccttgggcaaggctgctctctgtaacagaggcaatccttggaagggcagccagcttatggccatctgccaacagctgaagagcaacaagttcttcagtgaaggaaggcctggccagtgcagcactgggctcatttatattaggtaactccaggtaaatgtaagtgcatttcttagaggtgggatgaggtactttgaagtacctcactgagtttaaaggcaaaggtattgatacccacagttatattcattatttctggttgagttcaattacactgaatttgagatggcagtttgaaaatttactgtcagtaactaccaaaaaaaaaaaaaaagaaagagcagagcattgtcttcgcgattatgctgggacactttcagagtaagtccccaagatacaaggtccaaaaaaaatactgatgtggtactcaattgtggttctttgtagtctctttctaagagaacttcagctgcatgttggatggaaaacaatatgaaacaagggagagagagaagaaacagagtttgttaatattctctgctagattctgcagaggaatcactttattttgcagttgcaactagcttaagttatgtagctagaagttatgtagctagaaagctgacttgcacacttaaagctaatgaagagaaatgcaggttttccggggtaggttcttggcacttctctgcaaataggtaaaagggaatggcagatattcaagcttagggagcaagcagcaaggacagagccttccccgtctctgtgtgttgaagtcagcagatagcacacctgctgctgcgtgagttccttctgccaagcagagcagcacagctgcaagacaccctgcttctggctctgagctttgcttgtcttcagggatggagcccctcccaaggcaagttcaactgggttctttggcagccgaagtctacacggaccctgcagggagcggtggagaaaagtgagtttgacatgcttggaaatatttagatcttggatgtaaacttcaaggaaaatatttactctgtttgttttaataccacagaggtttggatcccgggaatcttcagagtacaaaaggctcttgccaaggcaccaatttaacaatttggtcagtgacaaaagggcatcctgtttaactagtctgaatttaaatagcatgtttccaatgtattagcatgtctgtctcatctgtttacagaactgttttctttaacccctgaattttgtgtttggtttatgaatttgcacagaatcaaatacagttttttaatagaaagcaagcaaaaaagcggatcatcacatagttgaaagagttgctacccgggcattgacaataaacttcccacgattacttgaccattcagagcaaccagatccttgtagaaggctacaagctctctttactcatggctcttggtgaaaaattccttactgtctctttgctggtgctgagaaatactgcagaatgctaaaggactgtccaattatatttttggcgagtgaattatgataaaagagaagccttttgtaaatgtgacttgaaaagtggcgtattttgtgtcctctctttgtgttttatgcagaatccctactgcaggacacaactttcaggactcacactgatttccctttagttttctgtttttgttagtctgcagcagagtgggaaatagttactgtaaagggaagtcttaagaaaacatatcagttatgtgcacaatatgtgtacatatatggaggaaaaatagacaaaaaaaggaaactggcatcacaatgctctctctaagggcctataagggatgaactgggactccttcctgccttcggatagcacatcaggcagagaaaatgttaaccatttttcaactctcagaaaagcagatttcatgatgtcatacaatgtcctattccactgtcagattgcttccccactttggcaattaaaaataattacactttttttttttttttttttgctgtactgccaagccaatttctcctatacaattgtttttagacatggcgaatgaacagctgcttttcaattattggacacagttgtatttcaattctcttttaacagctgtgaaacagaattcctattcagaattttataacagtaaaccacacaaaaagactactgttgtctctctgctaatggagattttgtgtcccacttctttttcagtaccatttcccagatgctgtctattatctttcctccatctttgcttgactgttactaccatgtgtatgattccaaccaagtctgatgtctgctgattaaactttctttacaataccttggtcattttttccctccgtcagaagagaaagttatcccacttctcctaaccagttgacaattaagtgaagaaagaattttaatacctaaatggtcattctgtcactacccactattgtcacatttcttcttagttggatatcagtcataagaacaattagagtgggaaaaagtcaaacatgtaaaaatttatatttgctaataaactaatttgcgtgggagccattagagaaatatagactcatctgctttacagcagcttagaacagacagagatctaccaggccagttagtataactctaatgcctttcatcttggagaaaggaaaacaagctagagtggttaagtaatttttgttttcagataaaccatctctgttgtagcttagatatcctagagctcaattccccagttttagtagcttccttattctgttttttggtgtgttttttttggacggagtctcgctcttgttgcccaggctggagtgcaatggctcatctcagctcactgcaacctctgcctcctgggttgaaggttcaggtgattctcctgcctcaccctcctgagtagccgggattacaggcaagtgccaccactcctagctaattttttttttttttttttttttttagtagagacggggtttctccatgttggtcaggctcgtctcaaactcccaacctcaggtgatccacccgcctcggcctccagaagtgctgggattacaagcgtgagccactgcgcccagccatcttccttactctttaacaaatggtaatctaaaatcagagaaagcatggttctgaaacattggaaggtaaagtaagagaactatatgttgccatttagctgtaataataattctcctagtctctaggccagactgaatttccatctggtagagatttatgcattaactgtaatacttgatttccccttgaagttcaaatctctttgggaggtattaattttatcttatttaggcatttatacagagtatgaactaacaatctgagagtatgttttgataggctgaaaggaggagatgcatgagggatttatacaatgccatttaatttaaacttataaatgtaatgttaatggctgtgtattagttttctattgctgctgtagcaaattaccacaaacttagaggcttaaataatacaaatttattatcttcttgctcttaggttagatgtctgaagtgtttttcattggaccaaaatcaaggtgttggctgggctaccttcccttctggagactctaaggaagaatccatttccttgtcttttccagatcctagaggctacctgcattccttggcttttatccccaatcttccatcttcggagccagcaacagtgagttgagtcctgatatggcatcactgtgatctcctctgctgctccttcttccatttttaagggccgtgtaattacatcgagcctacgtggataacccaggataacccctctcttctaatatcagctgtcaagcaacctaaattccattacaaccttaatttcccccattcagccatataacttaatatattcacaagttccaaagataaggaagtggacatctttgagggtgtgtcatcattctgcttaacatggagtgtaagagaaaagctacaaatatcaatgacttaactaaataataagtttatctcttattaacattgggagtttctggtagagcaatcctctaagtgactattcagggacttaggctcctttcatcttctgcatctgccttcctactgagcttgaaagccttccctgtccggttaatacatgaagaaacagagagaggcttttgtgtgtgtggttttatgcaccaggcttggaggcagtgaaaattatttctacctatattttcattgacaatactcagttatgtggctatacctaagtacagtggaagttaggaaatatagtctatctatgtgcttgggacatgaagaaaatacatttgatgaagagctagtcagtctgtgccaattctgtccatttgttcaccaaacatctattccatttttcctgccacacatggaacacacgggtgtcctttctgaaggtggaaaactaaaggtcccaacaagtcattgcagaaaacttaaagtccagcatccttgagtgatgctcatctctctagaccagaattgaagtggcttctttgagcctacaaatgatatatatttatacacacacacacacacacacacacacatgcaaacaaacacacacatgcatacatataccatgcagggaagatacatagatacgggaaaacattttagacacctgtttggtaaaggaaaaaatgagaggcatgcagctgttactgaaccatagcaattttgaaatcatgttaggcacatattaagggtcctattatttggctgggaaaaaatctttcgtttattcctaaattatgctccctagaatctcctttcttcactgttctccatggttactgattccagcctctgagagattcttctttgtctatctttcccatgaccttcaggaagtgggattggagattatgtttggtgctgataaaagctgggggacccagcactaatcttaaagcttaagaagtcaatactttcagtccatgctcatagaatccttagggaaacaattttccccaaactaacagacattgaaattgtcttgtttctagtcaattacatgtgccaataactacatttgaagttttctcaatgtgataattctcatgactgatttattttttgcttcctcatatacaccattctaagccactcccaacctccctgaagctatctgaaataatatttttgaatactgtttccttagtctaatccttatattaaattgtctgttttttaacaataattttatttgattgttgtcattcagagcctttttcaatttatcttaattaggatgcagaagcactcaggtttattaactctaaaagttattgatctctggatacatatccatttcaatttctgcttcaaaataagtctgtttttgtctgtgctcatctctttcttgtaatacattgctaagaaaggccaatagtagcaaataggcactgttactctcatatcaatctcttgtcctcacgtccaaaaactacaggcttataggctcatgaggtgtgttgtgcctttctatttaatgtatgaagtggttttaccatatgttttgccatgaaacaacatgacctgaaccttcattgttccaacctcatctatcagcctccatgaggctatctgaaataatatttgtgaatacttatttccttaatctgatctctatcctaaggctgcattataggttctgggatccttcccttttcagggacaaatggaaaaaaacaacaaggatcacttgtgggatattgtgataaaatgggcctgaaattgattaacatcttttctgcccacattctgttggtcacaattaagtcatatggccatatttaattgcaaagtgtgatagaaaatgtatttgtgtgtgtgtgtgtgtgtgtgtgtgtgtgtgcccagtgggaaatggcaatggattttagtgcatatgtgcagtctctgtcacaccaaaaagtacaaaactaagtatctgggtatgccaaattcagctatattgttagacggtattgcttagagcattatgaactattattgatagttactgaacatttaacagcaaaagatctgttgatagtatgatatcaatgtgcagacgatttaaaaatcttgaggcattccaactatcatacacaaatcagaggcaattcatttacttaagctcattattgactacctattatgtattggactttatgttatgtgctatgcaaagaaaaagcacaggatatatctgtaacctcaaaaagctctcagtattccagaagaggcaaacatacacacaagtaactaaaacacatttttttgttctattatgcagttataaacattatataggagcacagaagagggaactactatgtctagtcttatttaaaaacaaaagaaaacagagacagcaagaaaatagtaactattaagaatgctgtggtttgtttttgtttttgtttggttttactatgtaaatgaagtatctcatcaaataaggaagactttatgagcagggagttatcaaaatgctgaacatggctggacgcggtggcttatgtctgtaatctcagcactttgggaagccgaggcgggcggtgacctgaggtcaggcgggtggtgacctgaggtcaggagttcaagaccagcctggccaacatggtgaaatcctgtctctactaaaaaatacaaaaattagccaggcatggtggcaggcgcctgtaatcccagctacctgggagaggctgaggcagaagaatcgcttgaacctgggaggtggaggttgcagtgagccaagattgcgccattgtactccagcctgggaaacaagagtgagactttgtctcaaaaaaaaaaaaaaaaaaaaaagtgctgaacatgctgccctgaagaagcaaaacccaaaggtgttcaaaaaggtcagtggtttgtctaattcaatgttttggggaagatatcttgaaatcttaaaatccagaacaatatttaaagtaagaaaagaagcaaagccattttttcctctttggtggttgttattgttgacgttgaagagtaactggaaagaataagttaaatggtcaaaagtttgtttttgagatgcctgcagtatggcacttgggcaacctcccatgatgctagatccctgttgggtctgacgaaggcagacattcattaagcctctcaccaccagtggttggatcccatccacttcatgcaagtagacaaccacaagtattttattccgtatatcagtaccagaagctaggagcatggaatgcacacagtatgctttgaacctcataattgttccttgtaataataaatttttacatttgaacctgtgagttatcaaggaaaaaaaaacaaaaagccactttggttaagggatagacttaaaataacaggaattatggaaatggaaaaataccacttttctttgttggctcaaggatttatgtgtggggaaaaaatgattcagaggtgatggcctttcttggacattaacaaactgtagaggagtttgcgtccctgacaatggatggtgtgtaaaatctaatggtggtgggggtgggaggaagaggctggatgtggcagaaaaagagaggctgagcttaggcagttttatacttacaaagggagaaattgtttggattttttttcttttttggaaagaatatctattgttaaaagtcacttcagcctttgctagagagtgagaataattgggctttaaaatattaatagaatatgaatattgatgaaaagtgaaatatcctacaaacaacaggctttttccagccaatttgttatactcaactcatgccgatcggattctgagctttatacaaataaactttagatggaaaataaatcaaacatttaaacattagaaatctcatgacaaaagaatagagaaacaaatagacatttctttcctaagagttgaaattaaagaaaaaattcacagttgaaatttcaatacattaaaaaatttctaatgtaaaaacttattttctgttgaaatgcaaaccacatattacagtgatagttacattacataggggattgagttcatctcttaatgcctcatgcaaatttataagaaaataattagcataattaacaataatttattggtcgatgttatagtaaatgtataaatgaacaaataaaaatagcagatatgctaatggaaactgtttaattatgctaataataagaaagtatcataagttaagatgttatttcacatattaaattatggtaaacacagaaagagaatgtttaaagctagcaagagtatcatcggcctgattatccttcactgatgatgatgttataaattggtaaaactgttttaggatgcaacttgaaaacgtgtgtatttgttgattgaataagctgaatttagtggatgaaattgtgaaatgattgtatttttcttctgcaacagcctgttaaattctgtgttgaattttccatccttgccccccgacaaaaacttctgataaattaatcagtagagctgattaccagtagagctgatgtacaaaagcctagtcaaaattaagaaacaaaacaaaaccaaaccacaaaatcttttattgtctcatcctcttttaagcttctcccctggacccctgatgtgggacttggaaaattacagtaaggaaagtagatacttcattattttcccactttattctttcatcttcccttactcaagatgttatttcttgaccccgtcttggtgatgttgggtagataagagaaaccagggtggaaaagttatttatcaatcaacacagttgtaatctggagccagacagatacctaaatgctgtcttcctactgaagatattttgtaggttcttcaaaaaagccagtgaaaacaatctgctatattattcactgtcttgggcagtgccccaactagctggctatgaatgccatccacctgaacctctgcttcttgggtaatctttctatagcctcttagtgctgttgtctgttagccctcgcaggtaagccacatgttgggatcctttctaggtaatttatgcctcgctaccctctgtagggtccacactggctccactttttctccgtgttcagccatcaagactatttccagccaatctcctgtctttaaattttgcaggcaagagctggcctctttgttttccaaatccctcacatatcaagatctaaattccctcacttggcctgaggttagttaagaaagtatgaaggaaggaaagagaaatgctgagtaatgctgacaactgttccaaaaaaataattgatcaattcccctaatgaatgcttaccttttgttgtataagggaaggcaggtgatggactaagagcagctgaatctgttttgggaaagcccttttgcagctcacatttaaaagatcgggcatctctcttcagaaggtacagtaattattgcatacacttttgagctttgaaatcgtagcccaaactgagacaatggaaaagtcccatttagatgttacacattttaaaaaatcttcagaatttccaaacttttagcctctaggggaagaaaacagaaacaactaaattatgtaaaagcttggtgcgttaagatagtaattatagtgttaatttgaaaactataaaatttgaaaatgagaatttgaaagtaatccaatatctcataataggagaatagttaagaaagggcatatctaaattaaagaaaacctgccttctaaaataatgagctatgttattgtgcaggaaaatataatacaacattgagttggaaaaatgagacataaaattgtatttacactatgtttataactatgtaaggtacatatttaagaggtttgggtcaggaaataaaacagctagttgtctatcacagccctggaacttggtagctcggtaaccttaaggacattatttaaagtctccaacttatctctctaaaaagaagataatactttctgttgttttcatgagacttacatgcgctaaagcattgcctggcacttagtaattaattaaaaagctctattgaaagactgaaaaggacacacaaaaatgaaaataggagtgatgttaaaatgatttaaaattcttttacattatttgtaatcttcccataatgctgttttgttacttccataattaaaaacaaactaaaaaagctaaacagtagggggacaatatattggtgacaccaacccacaaacatgtaggacatctaaacaggaggttgcaccaaattgaggcttcctcatatatcacagacaaaattgttttcccaagatactgtgttaaccaatcaattcaatgctcattccaaccaattggcatgttctagtaacctttgtatcacctgggtatcattggcatagattttaaacatacgttacagcagttcactttgctttctttgtagtccatttctgtcaagttacaaaacccaaataaaatatttcagaaacaaaccagggctattatccagtttatgagcatttagataaaaagggaaaaatcacaaccccctgaagtaggcttaattcaaacaagagagtatatcttgcaaaccattcgataatttttattacagtttttgatatgcacttattatctagactataatctgcaaatgaattgggtattaaagtaaaccacttttgaaagtttgcaaataaactatctccctatatattatcactcttttatttgctcttatttggactaataaagatgaaaacattatgtgccttatttcaaaccaataagagagccaaagagaactttgaaaaatgatgtaaaggttgaaaatttaaaagtgcttcctttagtgggttttggacaagaaccttgaccatatcccagaaatatataattgattcacctaagcttgtttcttaaagactaagtaaaactattattcacatatgtacttctcatatggctttatgctgttgcttctcgtgataacttaaaataatttttaaaatccatattctcagatttgaggtgaaatctgaacaagtgcaattacgtgtctttcttcatagttacacgtggataaactactaaaaataaaccccaaaataaaaacattttaaacgtaatattggagaattttcttccattaactctttattacttaaaagacggtgaattttgtctggaaccttgtggtcaactattttaaaatgaacatagaattgggggtagtaggtcattgatatttctgatttttaaaaatttgagttcagtagtttatccatcaaatgttgctagaaaacattaagatctgagtgtcatacaactataagcattgatttctgagttacggcagctgggtgggaagggtacatcttggctgagatcagctggtctttggttccagccacgtatttggatcagttttgctccaagtgttctcagcttttgagagtagtaggctggatggggaatgttctcatgatgtgggatgaaaggtcccaaaggtgatgagagaaaaaaaaatgccacttaaggcctaggcctggaatgtaggccattcccatcccattattgtaagttacatgcccaagtattgctaatgcctattcctctctgagagatgagaaagaatggaatgaccattcctgaataacaatttaatctcccacaagtgatacatattgtacttcatgttcctacaatgttgtcataaacatttccacccaatgactaaattctcctgcttcttttctctttaatgtctcttcctacttctctagtttcttgggttacgaatgccacatatctcccttaaactattccaatgatctccttccctgtgctttcatggacttaaccttcatcttctaaaatactgtcgttaactctgtattgtaaaattggggcatattattctattccttataattcagtgactccttatcataataggtgggcaaattttcttaaggtggaataggtgacccagtcaaactaacttatacatggaaaaatgactaaaaaataaccccccaaataaaaacctattaaatataatatttgagaattttcttctgttaattctttattactaaaaagactgtgaattttgtctggaaccttgtggtcaactattttaaaatgaacatagagttgggggtattaggttattaacatttcagatttttaggaattagagttcagtggtatattagtttgttttcatactgctataaagaactgcctgagactaggtaatttacataggaaaagaggtttaattgactcatagcatggctggaaggcctcagaaaacttacaatcatggcggaaggtgaagaggaagcaaagcaccttctttacaaagtggaaggaaggagaagtgctgagcaaagggggaagagccccttataaaaccatcagatcttgtgaggactcactcaccatcatgagaacagcatgggggaaactaaccccatgattcaattacctccacctgggctttcccttgacacgtgggaattatggggattacaattcaagatgagattttgggtggagacacagccaaaccatatcaagtggtatatcaatcaagttttgccagaaaacaataagatctgagtatcatatcatacaaatataagcattgatttctaatttatggcagctgggttagagcttctgctctaatttctgcattacattttagacatccatgatcctctcatgatttcatacaccttgatgcccctgtctctgcaatattatctatctgtagtgtcttcttccaatggtccatgagtcaaagtactcctgatcctccaattctacctcttgtctgaaattgaaccagtcaggagacactaggttaggaagcaaatgacagtggcttataaccacaaacatgtatttcttgcttacattacatccccattgctgactggttttagaactcttcattccaggacccagactaatggagtaaatcttatctatttatttcaccttagggaaaataaacatagtgaagcacgttctagctcttaaaacttgtgtttgccactaccacactcatatttcactggctgaggcaagtcacatatacatgtcagagttcaacaggatgaaggtgtaaaactcttcctcaagagagaaggacatctcaatgtgaggcagtaaatattttgaagagtatcaaaatctaccacagaagtggcccttttgtcttcctgttaaagatttcttttactatgttacaacaataattaatataactatcacttgctgaaatatctatttttattgatatctatatatctttattgatcactcagttcattgagtactttttctacttcccacataacttcaggcaaaagcattactaatttttttactacaacataatgaattccctctttctctagtttccaacatttgcttcatttacctgtgagccctcacctgtagctttaggaaaaaccacaaggcttctattgacggtgtgttcgaggcactacagactgtcactaaccctttcgtcaaagcccattgctcagttctaaagccacttccacattgtgggttggtattttgccaccatctcactgttaatattaacatatgatagttacatgttgctctgtaacaaattactacaaaacttagcagcttaaaacagcaaacatttattattatcagtttctgagggtcaggaatccaagagtggattggctagctgcttctagctcaacgtctcttgtgaggttgcattcaagctgttactgggccgcagtcatccgaaggcttgactggggctgggagatctgctttcagtatcactcatggggttgttggaaggcctcagtttctgctgagtgttatccagaggctccagttcctcaccacatgggtctccccacagtgctgcttgagtgttcctcaagacctggcagctggtttctcccaggatgagaaatctgagagagatgtccaagagggaagcttcagccttttataacttagtgtcagaagtaccaactatcaattctgccatattctgttggtcacacaaactgtgatacagtatatggaaggactatacaatattaggagataaggatcattgggagaacaatatggtaggctggctttgacaaatagtatttttttcaaccttgaaaatccagagctatcagagaaacaaaaatgactttaatgtgactagtttagttgactatttatatagttatttaaaaaaatctcttttacctgtgtgccagcccctatgatagctgctggtcatgtagaaatgaaaatgtttctttctttgaggacattacaaactattagggaaataaacatacacagttatgtatcataattttgtttcatcaacaataaactgcatatacaacagtgaccccataagattacaatagtgtatttttactgtactttttctatgtttagatacacaaatacttaccactgtgttacaattacctacagttttaagaacagtaacatgctatacaggtttatagcctagaagcagtaggctaaaccatatagtctaggggtatggtaggctatgcaatctgggttttttgcgagtacacactatgatgtttagataacatcatcgcctaatgatacatttctcagaatgtatcctcatcataaagggatgcaccactgtgcagaagttaaaaattactttatacattaattgctgtaatagagtacctacatatcataatgagagtcaaaattacaagtggttaaagacttcgacttttggagtcagatcacagaattttgattccaagcttcaccatttattagttgtagtacctttagcaaattactttacctttcgtgactcaattttttcattcactaatacagaaaataatagtgttttcccatagggttgatacaaattttaaatgacttctacagagatagatatataggaaggtaggtagatagatgatagatagatagacagatatgcttgcaggtatgtgagtcaaaagttatttcaatttgaaagaagtggtgttcttgtcatgcagtggtagcaaatttagaaacattgtcatttgcagttacatataaaatagaatatatgtgcaataaatttgataatccagctaagttgtgacaatgatgacgtcaattgcatgcatgggtggaagaggatacaaaggcagttttagataaagaatttcatcacttattggaataggcatttccaatttcttgcttattcccaacatttgagcttataatagaggatcaaagaggaactttttttctctttataaaaataatgcctttaattatctgaagaatataaatgtgaaatggataatttactgtgtggatatttgtgcttgttaaagtaagagtctggatatgattgaaaattagccatgcaacaattctagtctttcttattgccatctagcctgctttggccaagattgtcataaaaagctagaaacattgcatagccactgtgataatctgttctggtggaccatctatttgcatgaccttggttataaggtcatgcaatgtgctagagttggtggggaaaaacttgtgcctttgaaatttaagagcactttttattccctctggtagttttcctgaaattccgtgagtaggacttacctagcttgattcttcgttacttggaaatcctgaatagtttctcttggaagtaacctgatggaaaaaattaaaaatgtttcagaagaactattaatgctgggtgttttctttttctgaagcattttatttttatttagacttagatcaagaacacttatgagattaaagttagctgatccagcatgacaaaaattgtttttatcagaatttcaaaccatagctttatgcatcggtaggcttgactctgtttttaacaattgtctttacctttcttgcactttaagaagataacaaattaaaagctttttactacaattttgcttcaaatggcatgttattgccttaaaaaataatagtttctgaggaatgttaagggaatgttttaagaaagcactgacacggtctccagaatcttttcatagcggacatttagtcccattcttattacccttaatggttgttcctttttaaagaacaagtaccaaatgtatgatggggacttcccagagaaagactaggttctattactgggtttctgcaggaaaaaaaacaatctataggaatataatgaataaacccaaaggaattccatttttttaaataatttttttttgtaaacacatactatagtcctatcaacaattagataaaatttacatgttgaaattctcaaaatccacccatggaaaaacatttgtaagatttcaatggtgtggacaatgctgtggattggacaaaggaagagcaggcttctaaagtccaaggagatcgccaagtaattggatgctctatgatgtgatttagtgcctctgccagaacaaggcatccaggaattagtgttgccctcttttagttttacataggagaatttgtggtgtagaaagaaaagaagagactttggaataagcagacctgagtgccattgattaacaccttcaacttccacagacttctgaattgccccaaacatctggttttttcacttctgaaacaaggacagaaattaaagggatgttgggaagtgaaatatctagcagggctctcaccaaggttagttgccttccacttgctgttggtgtttgtatgagttagatttatatctaatttcttaatgtaattcaccagaaggttatagttttctccatgcacaaataagctccacaatgacacagaaaaattttatcctctgtgaagaagacaaaggtcttagaaaggtaaattttaacctgtttgaaagtagctgtggaatagtggaaagagaaatactcatgcaattctaacccaaggcttagcctgtcaccctaagctgtcagatccatggcttcctcctttatgtgatgaatttagtgagataaattattcaaaatatagaagatgattaataaaagcccattatgaaaaatgaaaataaaaatgaactataactaactgaaaatgaaggatgccttccctcctgattcatttttaacataaagtgaacaaagacacttagaaccgtggggcacctgcgctctttcctctgtttttatgaatatataacaggaaaaggagagggagattgtcatacatcatttttttctaagtatgctttgttacagcagcttcactaattaatcctgctacaacccaatatgtgggtgaattcttctgttcaaagcctttggaacaatcaagtgtgtcccaacatgttttatttctcttttcaagttgctacacgcaagtcctgatctgttttcttctagttagcatgttgctgcagaaaagggctttatcagcctcatgagtttcaatatcagattgaatctgctgtgatgcttacagacagatgacagcaactcccaagcagctaatggtgtgtgattttgatcacattcccaggactgaaagtgtgttagcatgaaccattcccacacattcacctggtgctcctgtgactgtgtcttgagaccaaagacatactttttgagggagattatacaggtcccatggggggtaacaggtcaagtaaacatcttggaatgcagcttatgctagaaagtcattattaaattatttgcctctcatgtgaaagaacctcaatgggtggttttaaagatgtattctaattatttttcagtcaaatgaaaatcagtaaccaagatacaaattatacagcaaagattccacagaaacaaattaatggaaaaactgtgaatatgatctttttgtgattaaacatttctaacatgaatgttcagttttatgtttcttcatatttcagtgatgaaaaaattttattgtctttcaattttattgtccttcaaattttatatgtctttcaaagtcagtcaacactgactttgttctgaaccttgaaggtcttgtttggtgccctggtttgaagtctgaacgaaaagaaaccaatcattataaaacaattttcacatattgtaagatacagtattatctgtactttaagtcactcaccttgttctttattctgaaattctttgggaacacaatatcatttttagtaataaacaagataaagagagaagtgacaatgccagaaaatagaaaatcacttgtttacttggtttactaaatttatttatataatattattttcttcttgcagtttttgttttgctttgttttagtttatacatgaaagcaaacaagacataataccatggctcatagtttcagatcatgcattcctgaaattcccaatcttttacaacaggaaaacttctaagattgtatttacagttgaattttacccggataatatatactgtgactatagcggctgaaaatggaacattcatacagttttttaagtcctgagcctatcaatcaaataagaagtatagtgcaatcattattatcaagtgaactaacctgcaaaatatacatttagattgccaaaagtttagatggaacaaggggaacacatagacaaaaagaatcatccccagctaaaataattatctatttacaaaacttcaagctcagagatatttggcccaactcattgatgggcaggttcagcatctccagatatttagttcaagaagccctggttttcttttttatgctattgttttttttaggaattggcatgttcagttaaaaaaatccaaattttaatattggaaaagcgaatcaaattggttcctggaactattctttaggcagcctcaattgttcagagagcctggatgtggtgaggttaacactgaccttcaaagttggagacaagctcttccagcctagtcttccacatggataatgatacctggaatcagtgaagttacaaaagatatacattatttgtataagtatctgtacaaggtttcaagaacacctggtagtttttagcttttcttccctcacactgctgccccagtatattttctttcaatgcagaaacaccttacgttacagaatgatgacagtatgaaagctgttcagaactgtaaataatgattttccatgccagtcttttttttttggtacatatatatgataaggctgagaggaaacaattaaaaataatgtctattttattgcaactaagtttatagcctttcaatgtagaaactcctgaaaaacttggagaggcattcaaaagactcataaaatgcccttacatctcagttcgaaagtgaatgcatttgtagcctttccgtttttgccaaaaaaaaaaaaaaaaaaaaaaaaatgaaaaattctgaaacgtttgccctttttttccctcagatgagaggtataatgtcctagttgctgaggtcctctggaaattgagataacttgaaattttcttattctccctcatctaggaaattaaataaacaaatatatcttttagtatgtggccgtgggaacatgaatatattgactgattttttggagaactaaggtggaaagaatgttctttatttagctgcaggtatctgatatttccctctaaataaactcagccatagacttaagacttcttaaaagttcatttgtatgtctgcccaagtaatacatctaaatcagattttttcagtcttgactttattgccattctgagccagaatattctttatgtgggtgagggagtgttctgtgcattgcagaatgtttagtggcatccttggcctctattgactggatgccagtagcttctccaagccccacctcaatcgtgacaaccaaaaatgtctccagacattgtcaaatggcccctgggggggatatagcccttggatcagaatcgttactgtaaatcttgcaaaacaataatactttactacttctaaggcttaatatgttagttatctaggatatatggatatatatatttatattctcttatagatagtttttgtcattcatatgcaattctctaagctctttgattagtctactaaaagaaagtgaagattggcttaaacgtaatttttttttctaactcttacaacgtaccgtgtatgtctgttatattttgaaaaccaattttaatgtgttggctgtctgttcattattgatagaaacaatttcttgcctttactacatcactcaggggatcttggatcttagttcaggaacagtgttttgctgggccagcttcatgtgtgatcatgtcactattttaaaatatatttgctgataatacagtcttatgtacagctgtcctcaagagctagccaacaactgtctcatcaggatgggttttccatcttcttcttcttccagcacctttttcttccttccatgatatagatatattgatcatgaggagagggctcacccctcacccggagaagtagttggggaagcaatatgcggaaacaaagccatgaatctgacaagaaatgtacttaaggtaagtaataagattgggttgcatttttatgatgtgctacaaaaaaaatgtcctcaaaaaatctagctctggaagccaaccattattcactttgggggagcatgccatgcaaaagatctcctggttttgggaaatcacacagtgacctatgttgtttctgctgcctaccgaggaacacggacgcagcttcagtctaagaaagaacgttcaattgaggcagtcactttctctgggccaaattacattcttcataatctcccaagtgttatatttaatttacatttgaaatagaaaatatgtgaacatagactttggctcacgaattatttcagttttctgaattcaggagaatgtgcttgttgaagcagatgtttctgaattttattttattactgaaatttccacaaatataaatcatttaaaaatacatgatttaagagtttaataacctgaaaatgaccacccagcaaagtttttgtatctttcctcagcatttctgatcatgtgttttcaagaaagcattgaattttttagcaaagcttctcatgcagataatctcttaaaggtttaaatctcttacggagcataagaaaaataaactattttttgacttcaatctaaatggaattctgtactcttcacaagcccctgaatatttcataactctgaaagatgcaaatgtaaatttcctatgaatcccgattttattcaaagattgaagccctatcacctcacttagaacaaatttcatccattaacaactatcttgcaggtaaagggaagccaaatataagtaaagtactaacaaggccaattacgttcaggtgcatggatgattaatcataaaattcacaacggaggacactctgtgggtaaggaatatgattcctttttgcaaataatgtggtatatgtatatatttttcttctcttctcctttcacatgcactgtttagattgtatatatggagatgaatacccattgtcctttgcactttctggatgataaattagaaaagaaaaatccaaagaatgaagttgtgctatttgtcctcacttctgatttgggaaactagaggaaattaagatggttagtattgctatgatttttttccccctgaaccctaggaaataggaatttaaagtccttaaatatattttctataatcaacaaattataaagttattttcactaatctttttgaaaatacaaatataagccagaggttcttattcatggctcatttctcaggacttcataagaccatgaagcacagtgaaacccatatattgaataggtctcatgcaatctgcctgcattgactaaaccaaacccactcattcaaactttatcaaatattttttatcctttaccatgtaccagaaacaggacaagggacgcagaatatagaggtgaaccaaagaaacagttcttgtcctcaagaagcttatattttagtgtagcagacagaggcacaaagaatgtaaaccaataaagagaaaaagataatttagatggcagtaagttatataaggaaaattaaacaaggcaatgggatagaaaacaatgaccaagatgtagagaaaactttggcttgggctgtcagggcgtgacactcactagagagattccatctgagctgagatataataaataaaaatgatctaaacatgtcgattcagggaaagactacttcaggaattgtaatcacaaaatcctattcctaagataggaatgggctgggtgtccttgatttagagaagaaaatcaaagtgcgtactctaggaagtaagattaggtcctgctagggactgaaccgtgtttcttaaaaatgtgtatgttgaagccctcatccgcactgttactgcattagagatatggcctttaaggaggtaattaagattaaatgaagactaagagcagggcactaatctgatatgatgggtgttcttataagaagagacaccagatctctctctctctctctctctgtctgtctttccatgcacagggaaaagaccatgtgaggacacagtgagaaggagaccatatgcaaagcaggaaggaagatctcactggaaccaaaaaccagccctgctggcaccctgatcttggacttctagcctttctcagaactgtgagaaaataaatttctgatgtttcagccactcagcctgtggtcgttcgttatgcaaccctagcagacaaacagggacctagcttaagaactggttaaaaatgaggccagtgaggaatttgatactctatggttgggaaagtttgatttattctaagtgcaatggaatggagctggggatataaattttggatttactggcaggtgaaacatattttaaaatagactaaaattaaatttcctaaggacagaatgtagacagaaaagaatcaaggttttatgaccaagatccaagtcactccaatatttagagttctcccaagcatttaaagaaggcttacactgattctatgtagcatcttccaaaaaatagaaatttttcacggcatctttccaagtcattatatgaggccaaaattaccttgatattttaaccaaagacagtacgagagaaaaagctatagatcaatatctcacatgaacttagacataacatttctaaacaaaatattagcaacttgaatccagaaatatgtaaaaaagaattatgcaacatagccaagtgggatctattccaggtatgcaatgcttttaaatgtttgaaaaaaagtcaatataatctaccatattaacaggctaatcacatgatcatatcagttgatgaagatcaaatctatgacaaaatttaacacctatttataattttaaagaacctctctaaaaataaaaaatagaaggaaatatcctcaaattgataaagatcatttacagaaaacacaaaagctagcattacacttaatggtgagaatctgaattagttccccctaagatcaggaccaggcaaagatgtttgctatcatcactctcattccatatagtgctggaagttctcactggtgcaataaggcacacagtggaaataaagacactgaaatttgtgttagttaattttgtgttgctataacggaatgccacagaatggataatttattaagaaaattgtttatttcttacagttttggaggctcagaagttcaaggtgcaggggcccacatctggtgagggccttcttgctgtatcatcccatggcagaaggcaaaagggcaagagtacaagatagaaagagaaagagggatgggggaaggttgatatgagggagccaaactcatcctttttatccagagtccactcctgagataattaagtcacttccgcaatacatcattaatccattcagagccctcatgacctaatcaccttttaaaggttccacttaacgctgttgcactggggattaagtttccaatacaaaaactttgggggatgcattcaaactatagccagtttgaatggaaaaaaatttaactgtttctatttcaaatgacctaattgtatacatagaaaattccaggcaatcttttaaaaactcccagaactaatgtataagtttagcaagatcataggatccaagaccaacacacaaaaatcaatcatatttttatacgctagcaatgaatatgtggaaaacacaattaagaatacaagactatttacaattatttcaaaaaagagagaaataattagatacaaatctaatgtacacataggtcctctatgccaaaaatgacagaacccaaaggaacaaatgcaaaggacctttaaataaatggagagatgactttgtaatggatagaaagattcaacataataaagatgtcaattctctccaacttcatcaacaggggcaattcaattcatatcaaaattccaaaaaaatttttttgcagatatagtaaaatttattttaaaatttatatctcaaggcacaggccatggactaagtaaaattattttgaaattgaataaagttgggtagattattatatccaatgttaagacttaatatatggctacaataatcaagagagtgtgatattggttgggggaatagactcatagatcaatggaacagaagagataacccgaaactaaacaacacaaatatgcccagctgatttttgcaaaggttataaaagcggttcagtggaagaacagttctttcaacagatgatgttaaagcaattagatgtccaagggcaaataattgagtctcaacctaaacctaatacttcattcaaaaattaattcaaagtgtattatagatttaaatataaatgtaaaactaaaaaactttagcataaaacaaagaaaaattttaggaagtagggctagatgagaagatcttagatatgacaccaaaagcacaactcataagagaatataattactctattggacttcataaaaattaaaaacttttgctctgtgaaagactacatttagagaatgaaaagttaatctaaagttaatctacagactagaggaaaatatttgcaaatcacaagattcaacatagggcttctacttagaatatataaagagctctcaagctgaacattaaaagaaaaataagcaggctggtctgaagatagcgaagtatctcaactgattgttcacagttcgttaaggatcttactctttgttctacaattccccccttctcactactgcacttgactaataaaaaagcaattaaattagaaaatttataaacaaaattaacaaaagatttttaactggggagagatgatatctcattttagttttgatttgcttttctctgataatcaatgatgttgaatgcgttttcacatgcctgtttgacatttgtatgtcttcttttgggcaacgtctattcaaatcttttgcccattttttaaatcaaattattagattttttcctgtaaaattgtttgagctccttatatattctaattattaatccctcatcaggtgggtagtttgcaaataatttctcccactctgcacattgtctcttcactttgtttattgttcccttcattctgcagaagcttttaaacttgatttgaccccacttgtccatatccaaaagacaggcaataacaaatgctggtgaggatgtggagaaaagtgaatgcttgtacactgtttgtgggaatataaattagtataaccactctgaagaatagtttggaggttcctcgaaaaattaaaaatagagctaccatatgatccagcaataccattcctaggtatatgaccaatagaagggaaatcaatatattgaagagatacctgcactcccatgttagctgaaacaccgttcataatagccaagatttggaagcaatctaagtgtccatcaatagatgaatggataaagaaagtgtggtacttatacacaatggagaattatttagccacggaaaagcatgagatcctgtcatttgcaacaacatggatggaaccggagatcattatgttaagtgaaataagccaggcacagaaagacaaagatcacatgttctcacttatttgtgggagctaaaatttaaaacgattgaactcgtatacatagagtgtagaggatggttaccagaggctgggaagggtagttggggttgatagggaagatgaaaatagctaatgggttaaaaaaaatgaaagaatgaataatacctggtagttgatagcaaaacagggttactatagtcaaaataatttaattgtatattttcaaataactaaaagaatgtaattggattgtttgtaacacaaaggataaatgcttaaggagatgaataccccatttaccctgatgtgattattatatgcattgcatacctgtcatctggatgtccaagcagaagtttgctgcagaggtggggcctcatgaagaacctctgctagggcagtgtggaagagaaatgtggggttggatgccccagagtccccactggggcactgcctagtagagctgtgagaagagagccaccatcctccatactccagaacgatagatccaccaacagcttgcactatgcgcctggaaaagctgcagacattcaacactagcccctgaaagcagccaggatgggggctgtatcctgcaaagccacaggggaggagctgcccgaggctgtgggagctcacctcttgtatcagcatgacctggatatgagacatgaagtcaaaggagatcattttggagctttaagatttaatgattgccccttgggattacagacttgcatggagtcttagcccttttgttttggccaattcctcccatttggaacaggtatatttacccactgcctgtacccccattatatctaggaagtaactcacttgcttttgattttacagactcataagtggaagggacttgctttgtctctgatgatactttggactgtgaacttttgagttaatactgaaatgagttaagactttgggggactgttgggaaggcatgattgcttttgaaatgtgagaacatgagatttgggaggggccaggggctgaatgatatggtttggttgtgtccccacccaaatctcaccttaaattgtaataatccccatgtgtcaagggtggggccaggtggagataactggatcatgggggcggttttccccatactgttctcatggtagtgaataagtcttacgagtctgatggttttataaataagacttccccatacaagctctcttttgcctgccaccatgtaagatgtgactttactcctcatttgccttccgctatgattatgagggctccctagctatgtggacctgtgagtccattaaacctctttccttaataaattacccagtcttgggtgtgtctttattagcagtgtttgaacagacaaatatacaagcacatatttttatttttgttttttttttttgtggggggaaagttttagttcacaaaaaaaaaaaaaaaatcccagaaacagaatttaaagagaaaagcagaatgaccttaaaaatatatgtgtatttatatatatgtgtgtgtgtgggtgtgtatatgtgtgtgtgtaaaatatacatatacacacacatatgtgacttgtcttggatatcagcttttaattatatatatgtatatatacccatgctaatatccatgctatgtaatacactatatatagtgtattttatatatatagtgtataatatatataatacatatatagtgtatatattatatatagtgtatatattatatgcagtgtatatattatatatagtgtatatattatatgcagtgtatatatatagtgtatatattatatatatagtgtacatattatacactatacactatatatagtgtataatatagtgtggatattagcttttaattaagttgagttttaaccctaaaattctttaaaacatcttttcaagtatcttattacccgattttagccaagataaacagctgatatttctggcctttgcacaaaatccagaaccattctaaagacagtttaaagaaaggaaagtttcaccagctacaaatggagtacaactcatatgtctctccagccatcttttctaggggtctcagcttctcagctgttcatctacacacaaaggccccaaaacatcgtgtgcctcccacagatggaagaagatgggaaatcaaatactgtccaaggaaggaaaaaagattaataatgaattggtatcccaagagtcacacaaatatcaaatcaagagggactaattccctgagcaggaagctaacctaagccacaatgggaattgtaaccaacagactacaaaatggagcagtgtccactgtgaacgttgcatggaatccaaagtggcctgtgtgagtgtaactttgttttacctcagattttgctatttaatttagttgaaagaatttttaaggtttgccatgacactaatatgattcttttaatactatcttcccattgtttggaataagggatctctaaaattttattttattttattttatttctcatttttaggagtctaatttaaggaatggatcttttagccattgaattttgaatggtgtacttaactccaatagcaactcaatccaataccctttctcagagaagaagtgattccaaagatcaaagattcccccattttcccagaaataggctgagagagtgaaacattctttttgctatagacagttaaaaatggtgttttcctcctgtaccccgaaatttgttgggggctgtgagtcacagaccagttaatctgtcacattgggtaggccctcctgtgattagacttgctcagcactaaccaggcagcacaggtcaagatgacaaaagcccctttatgaatggcacttcttatgacaaactcccaagagcttgacacgcttgaaacagaaaaagtcacggattcccagccattttcagactggccacctgacctgacccagaaatcatgccccacggatggtgggaaccaacagagaaagcgctcacttgatcacaggtcgagttcttaaggacataaacaagaggagacagaacctcaaccagtacccctctttatggcagaacacataaatacaaagacaaacaaaaagatttctgggaagaaagggatcaaacaatataaatattcatatcacaaaatgccaaaaagtacactagagttgctataccccaagactagtcacacaggcccccttttctcattaataaaaaccttgcagaggagagaaacagtaatttttaccatctactctactggactgaccaaaagagagagcaggaccatagctggtaagaaattcttaccccttttgctggcttcttaagttcctgggtctttttattgaggcttccagaagaacagacaggctttggtgattttgcccaaggcacaataactatggaagccaaggtccttggtccccaaaaggtttgttgaaaaatcactgacataaggtagattgagtaataggagaaaatgcatacaaatttatttaatgtgtgcacatgagagccttaagaataaagatcttacctcccaacgaagtgcaaaatcgtatataccatcttgaggctacagaaagaatggatgcttggaacctaataaaacagattatgggaggggagagaagaagaattctgttgagagaattactagggagaatgaatggatccaggaaaagatattaacttataagcagtagttctctttggaattttaataattcttggagaccatcattatacttgtaaaaggatcggctcaggtgcagttacattcttggtcttttctgcaatagataatgagataacaaggagaggaagaaaaaacaattattctgcttggtgggtctggatcttaggcagctaaaggaactttcatcttctacgagagggatggtatggagggaaagttgtcagagagaccttgaagcttcttcatttcagtatgtctgtcatgagcagtgaaaggttagagataactagttctacacatgtttatgtcttttgacaatgtcaggcttttattaatactgtttcaatcacaaaagtcatgcattgcaatgagttcccaaggaggtaaccctccttagtacttcccgttcacttggtagtcagtgctgcagacacacaggctcaggccactccacaagtctgtcaatattgcaaaccatacataatagtatacttaatcaatgtgtaaatgttatagattaaacattccacaacaaagtaatatttagcatcaaaaggaaaaagaggagaaagcattaatgaactgatccagggggagtgaagaagtaaaaggagtcctggtttgggcctggaagtccctggatattgcaaggaagaatctttgatatggcagagccttggtggcagatgctgagttcttagcacaggtgactggaatgtggtgtcagttaagatggccgatctgggctgctgaaggcctgctcctttatggttaaagagtcctccggtgagaaatgatcatggaagagtgtacttgtttttgtccttatctggttagatgcagttctttatttttttgtttattaagcaaaacatcttacccttgagggcaaagtgtcctatgaaatataaaatggagttagttatgtcaagggtactctataaatgtaaaaatggcatattttggggatattggtttctgaactctaacaaactcttcctaatttttatgacctcctgcaaaggggaaggtctgggagaaggtcagagagatcttacttctgcagtcttctcaagtgtcaaggggacgtattttggagtagtgtgtcctgaacccccatcattaatcaatgaagataaacctaatttacaaagtaaatttatgactagaataaactggtcctttttcagttctttacttttcctttgtacaatttagatagagaatccagatgtttatggcaaagttgatcaaataagaatgagggaaaaccaaagggaactgatgaatacttgaaaaagacaattggagaaaaatatgctattttcagtcatgaaataataacactttcaatgactccccatgtctcagatgatgggttgaggccttgcatactattcattcaacccttacagcagcctcaagaagccatgattattattgctattttatagattagaaaacagccttaaaagaggttacataatatattgaattttttcggagtttgtaaatggtgaagtcagcactagaacccaagtccctctgcctgattctcctgaagtgacactatgataagaagcttctctgcacaaggtcaagaaacaagggctaagtatttaaaatattttggcatgcagtgagcccatgtgtttaggtaagggtaaaaatagcatcattctcattttctcttgataagtctttaggtcatggaagatttaaatatgaatgctttgggattcagtggtactgtgttttctcattaaaaaaaaggattgaatttcaagccaagggatttctggaaagaatcatgcatgagagacagcggtagtactctggaggtcccgccatattgggaccggtcctaattggcagaaagaaagggaaagattaataatgaatataataacagggagagatggaacaaaaagggctccattctcttctctttctaatcaagggccctgataaaagacacacagacacacagcaagagcattccaaggttgaatcataggatcaaacttcatttccaaagctgctgtcttttaaaatgtaggttcagaaaaacaagccacgaacaatcacacaaattctctcatcttgggcgaaattttgagccaaactaaaacagaatattttctagaagcttattaaatgtttggcaacattaaacaatctcttatttgttataaaattattcttaagctctcatagcttcaatgatactaataggtctaagtaaagagacaaatatggagagaaatgttaatgatgactattcaaatggactaatgtgaaacaaaagggctggaaaacttcaatcactcttttttgtattattacaggtgcccactttgatgacttgttgtactagcgcctttgatctccatcatagaaaatgctctgctccatttcaaaagagattgtcatatatgccatttgccattcactggcctttggatcaaaccaacaacagacctcacagatagaattccaccaatgaccattcacaaagaggtaaattgtaggtcttttgcatcacttttaaatatttttttaagcagagagcagtttacaaaaaacaaatctgttaactaatattgccatctgttctgatctctaacaaggctttgagtctgggcttttatcataagggattttgccaaagtccttttattttcggctattttaaggaatgaacaattaagcttgggtagactatgcagtaaatgtttctgaatgtcagcttatgtctttgctgctgctgctagtaacactcctaactgcaattcaaaccttgatttttagataaggatgcgctgctgagccatgattaaccaaaggagactttgaattttccatgggaattttcctactggcagataattttcatcttgtagccagtaacatacctatttttgagagaaagagaaggcattttgccattatgaggagcagaatgaatgtagctggtccttctaaggactgaaagtgtggcttgttagcactgttttaatcatctggaactaaatttaaaaaggcagtgcagcagagtggaataaactgggaattgtagtcagaggtcaagggacaaaagccagaatttgccatttagtagctaaccttgggtacgtcaattcaaacttcacagcctctgtttctttatcctttatctgagactaataacatgggcttatctcgatgaacagttgatgtaatacttatgaaaatagtttgtaagtggtaaagttctgcatggatattgaataaataatacctgggccacaaggcccagttctaggaatgtgagagaatattaattataaaaggttaataaataatgcaatatggaaaaatgaaatactcatttatattagttttctattgttacataacaaattaccaaactttatgacttaagacacgtttattatctcacaggttcagtaggtaggggatctaggtgtggcttagctgggtcttttggaaaggatccgtctagaatcaaggtgtctgccagactgaaaaaaaaaggaaattctgccatttgcaacaacatgcatgaaacttgagggcattatgcttagtgaaataagtcaagcagataaagaaaaacactgtatgatctcatttatatgtgaaatctaaaaaaaatcaaactcaaagaaacaaaaagtagaatggtggttgccagggggtggggggtggggaaacgaggagatgttggtcacagggtacaaactgtcagatatgagataactaagttctacaggcctaatgtatagcatggtaattatagttaatactgtatcctatacttgaaatttgctaaaagtgtagatcttaaatgttctcaccacacacacacacacacacacacacacacggtaactcacagtaactatgtgaggtgatggatgtgttattttgaatatatgttcccaccaaatctcatgttgaattgtgatcctcagtgctagaggtgtttggtactgtccttatgatagtgaatgagttctcatttctcgtaagatctggctgtttgaaagtgtgtggcatcttcccacacagactgtctctcttgctcctgctctggccatgagatgtgcctgtttcaactttaccttcagccttgagtaaaagctcccagaggcctcaccagaagctgagcagatgccaatgccatgcttgtacagcctgcagaactgtgagcaaattaaaactcttttctttgtaaattaccaagtctcagctatttattttctttttctttttctttttctttttctttttgagatggagtctcactctgtctctgatctggagtgtgtgacacgatctcagctcactgcaacctccacctcccaggttcaagtgaaagctgcctcaccctcccgagtagctgggattacatgtgcccaccaccatgcctggctattttttttttgtatttttagtagagatggggtttcaccacgttggccaggctagtctcgaactcctgacctcaagtgatgtgctcaccttggcctcccaaaagtgttggggttacaggcatgtgccactatgcccagcctttagctgtttctttacagaaatgcaagaatagcctaacacagttaattaacttaattgtagtaatcatgtcacagtatctctatatatccgatcatcacattatatattttaaatttttatgatttaatttgtcaactatgtctccataaaactgaaaaaaactcacaattaattacaagaacaacagcaaaagctcttggctggagctggattctcatcagaaagcttgactggggatggatccactgcaaaaccgactcaggttgttggcaggattcatcattttgtggttgtaaactgaggtttctggctttttgctgactgttagccaggagttccaagaggctgctggcagttgcttgccacatggctctctccccaaacctcttacaacaaggcaggtcattccttcaaagcaagcaagagagaaagtctccagcatgagcctgctagcagggcagctttatgtaatgcaagataatcacaggagtgacatcagcacctttatcatatgaatgacataatcacagtagtgacagcctattacctttgcaattttattcgttagaggctagtctcagatcctgcctacactcgatgggggcagatttcacaaaggcatggatacctggaggcagggatcatgggggcttccttagagtctgtgcaccacactattcattattaggtctctgaaatttaaatatttacatcagagtatttttttattcagttcattaaacacagattttaggtatctgccacatctctgcaaagtgtaaaatatacacagcagtatatttatcagcccaaactgggtatctggcccagattattttcctctaaagcaagatgaagtttcttttagtttcaatgaagttgggtagtcagagtgagtgttgtcttctgagtgagctatcttgggattgctcttctgtatctagtctatcactctccatcttgctctgtaccctggaaggctgacctgtatagtctccattaagtcttctgaaatccagttgtgttcggccaatgggagcctacaattgaagagaaaagagtaaggtcactttatctaacccctaagcccctctctgcggggtcaactgaggctgcctgtgtccctctcctgagcattatcttctttttatggcagttcctctacaggagtctctcctgccaggatccagtaacacctctcttcctttgttatttaggcctagggataacaacaatgtgggcattactagccctaggctaccactgtgttttagtttttacctctgtttttttatttctctgaactcttcccataattttgctaatagtttctttattaaatcttcctcaagtccattgaatatggtcttgtttttttcttgctgggacactaacagatatgccacccaaagagttaatgtcctatgagcacagcagttagttcataaggaataatcaaaacatggttgttgaatgaatgaggaaaagaatgactcttcgccagtaaatgtgacctttttcccatttgataattcaatgtgttttgaggggcttcctttaccttgcacagttctggtaacaagagccaatgtgatgatccatatttcctggaaatgcttcccacaggtctgggattataaatgttgtttattctggaatgaagaagagcattggttttcttctttctctcttactcttagccaaaagatatgcatggggtcaaaagcagcaagatgggtacatttacaacaggatctcagagttaatttctgaatttagtaatgtcttaatatacatctgtggtaggaaaagcaacaatgcagaagcaaagattacaacactaatggagagttactgcaatgtgatggaaaaagataaaataagtatgaatattggataaagctaagattttaaaaaataggcactctatcaggaaaatctaagtaaaaacatgtgagattatggaacaaacgctcaaggaagtataaagcgtttgatttttaaagataaccaaaaagacatttggctgggtatccaatattgagtgttgacaaatgggaaaatataagggattaaatcaataattttgacatcttggtatggctggtttataggactatttcattgtgttctggtatcaatatttggccactgctgtcttatcaataagatatcattgagatgtctcaaccatttgttttaatcacacaggcatgagttatcatggcttccaataggaaataagcagctgtcagacttctggactttgtcttcattcctttctcttattagttttgacattacagacacaagatatcctggatggaccaaggactttggagtatgaataccattcctagacatagaatcattttgtttgtttatttgccagctcatgggccccatagagttcctctctgttagtctacttcctgttctactgtaaaagtaggacacaggatgacatgcctgaaaatctactcctctgagttttaaaagggtaagaacccaactcagatactattcatagggatccttggttttaagctgtactttgtacacttggttttatgtaatttttaaagaagaaaatgcatttgcctacttacctctaccaggactcaattagttacttatgacattacacgtgcacagaatgttctgtttatgaacatcttcagagaactttactaatttttaattcctatttttgaaatcttggtggaaatcacaagttctagtagcagttgtggcagagatacaagaaatacagggttgaacccatgggctagagacttgtgttccagacctagatctgccaccaactgactgcagaccattgatcacattacatctgtgggttccattctcttcttctgaaaaggtaacatacaaaaataaaaagtttgcatgcataatcactgtgatccatatagttttaagattctctaatgcataccctaattttcacttgctcaaaatacatataaaacttctgaattaacctaatttgaaatatttattgaacatttactttattcagagataggtgtgggtaatacacatagaataaaataacgtagttattaagctttttttgttttgttttgtgttgtgttgttttgttttgctttgtttttgaggcagagtctcactctgtcacccaggctggcatgcaatggcgtggtcgtggctcattgcaacctgtgcctcctgggttcaagtgattctcctgcctcaacctccccagtagctggggctacaggcgcccaccaccacacccggctaatttttgtatttttagtagagatggggtttcactatgttggccaggctggtcttgaactcctgacctcgtcatctgcccacctcgacctcccaaaatgctgggattacaggcatgagccaccgcacctggcctgagttttgtttttttaatgcacactctataaacataatgaccacattttaggaacttctatgattggttaaggagaaagggcatgttcaaaaataaacctgatgcttgacagggactgaaaagggagaccaggattataatccaaagccataaaaatatttttgtgtctaggaacctatcgtaagaaatgcaataatagctaatatgtaactttttctctgtgccagacccaggccaagtgcttctcataacttaaaacaatgttattaagtgagtactattatttacttcattctacagactaccaaagagtatcacagacattagttaattcattcgggatggaatcaagatgctaattcaggctactgtctgatagtgaattcacttctttttagatttaataaagatgcttgatgtattccaaaaaaaaaatgaaatagtttttaacaagtgacatctaagaaaactttaaacagtctatatttttggtccttacaatgtttttcaaatgtttttgtcccatgaccatctgtatgagaatcactcaagtggatttgttaaaaatatagattattgggtccttcccctaacttattaaatcaaaattctgagattgggtaagaaaatctgaatttttaacaatcattttggtttattccgatgtacatcaaagtggagcataaattctaaagggaaagattagatttcattagatgactaagttggacaacaattgtagatggacagaatatagacaaaggtatggcagctgaaaatatggcatgctggggatttgaaagcaaaagtttcctggggtgtggggtgcatataaggaagtagcaagatataagccttgaaaaagtacaggtcaaacttcattgagccttgagtaaagttgttaggactttgaactttctaggctttatttgaattgaactatttggtgtttgggggtaggaaaatagcctattaaagcagaattttggcaaacttgtcttgtagccattaagttggttggaatgtggatggattgccaagtgctgacataattaagcctcttatttaatgcctggattaattaatatacatcacctgatgatactgagtacccagctatgaaaagattaaagtaaaatacattgtgggaaaacaaaatacaacaaaattctgtgtagacatttcctgagtatagatgttgagagaggagtccaaaagacaagagcttgggtatctgagtgtctggaccaatgcagcatcatttagtaggaagagatgaatctgaaggagacgctggtttaatgccaggtggtggagaattcatttttacaagtgttgtggtaccagcaaaacactcggatcttcaggtctttaggcaattgggaattcaagactgaattgaaggtaaaatgtcacagcctgaggcatagatttggatgtgctggtgttactgatggaaggagaacactgaaggtcaaggagcaaataaaacacttagaagatgagagaaacaaataaaagagcagcgcctggggaacagatattgtggagaagagactgaggaaaaaaatgaacattattctcagtaagagctggatgaacttatagcctgaagtgactctggtatagtctcatcttaaatagggaaatatatacataaacatcttaaaatattaccagtgaccagcattatttgtatttccagagaatttatggttaaaattaggatcaaagaatttcctactatggtggttataaagaaagaaatggacgttacgtgtcttcataatccctctttagattacagatctatagatctttagattctctattgaataataaattaagtagcgtttgaacaaacctagcaagcaaagcacatatatcattaaaattattcgattcccagagtaccagttatactactctcaacctaaagggttctcagcagtttgtaactggtgacaaaagcctctgcctgagtcaggcactacttgagaacaactataaaacattcaaaaataaagtctcggctgggcgcagtggcctgcaatcccagcactttgggaggctgaggcgggtggatcacctgaggtcaggagttcaagaccagcctgggcaacatgaaaaaccccatctttactaaaagtacaaaaattagcctggcgtggtggcacgtgcctgtaatcccagctactcaggaggctgaggcagaagaattgcttgaacacaggaggcgggggttgcagtgagccaatatcatgccattgcactccagcctgagcaacaaaagcaagactccatctaaataaataaataaataaataaataaaaaataaagtctcattttcctgcatcatgaagagtccttctctgaaaatatcttattgctgagaacttccttaaatgtgttctcaagttcaacctgaaagcggaacaaggtaaaagtgtttgtgtgtgtgtgtgtatgtatgtgtgtgtgtgtgtataaaatatgtatttatatatgcatacatacatatacatgtatgtatatatgtgcgtgtgtatatatatatatgtgttgatatatatgtatattgaaaacaaaagggaggccaatttgatagaaatatcagaaaggtcaagctcagatggctccagcttttaacaaggaggatttagcaagatctttttccttagaaccagtttcctttcactgactctgcctctgggcacacaaaagcgtgctgccatgcaatggggagttagtgtatttgtgcatgggggtaaggctgcctttgataaatataaaaccccatcattatctcattttggtatcttctgagattttcctaaacagatgtcatggaaaattcactgggaaagaacataacttgttacaaaagtaacccacagattttatctttctcttttgccttaaaagttcaaagtttggagaaaacgacttaattgagataactttaataagaaaaagaacagaagggtaattcgtgtggcactgactgggtagtagtaaatgaactgtgttggatggaaatttaaatatcctaaacgtcctgtgatagtgtgtggcactttaaaagtattccattttcttaaagtcttcatcattctcattttgattgttgctgcgcttcatgtattaggaaaatgctgctatgaacagaatggtaagtttgagttcatttttccaaatgatggcctgacttttaaacgaactatttgcggacttgataccaaaaaggatgcatttgcaaacagtgaattgacttcaagtctatgacaaagggtaaagagattgttatttgtctattaaagaatcaaatctttgactttaatcatcatttaagtgcttattgaacttgttactaaaataaggaagtacttctaaaggcctgtatactgactggaaaagagtttatggtaaagctacaaccattagtatggagcaataagtagtcacttgtgatatgccttcaagatgtggtttctctcagaatccaagcctgggtgatcttgcaaggcatctgagaatcagcttaataatttttccttggaacattctaaataaatgccctaaccactatccatctattataatgcttaaaacaaagatagtacgaatgaatagtgaggatgtgaagcaacaggaactcttgtatgttgttcatgggaatgcaaaatggtacagtcactttggaaaatgggttggcagtttcttatagagtcatacatacatttacctatgacccagcaattttactctttggtatttacccaagaaaaaagaaaatttagtaaaaacttgtacatgaatggttgcagcaactatattcattactgctaaaatctggaaacaatccaaatgtttttcaattgttgaatggataaacaaaccatgagatatccatgcaattaaattaattgactaagcaacaagggtgaatcccaaatgctttcttctaagtgaaacaaaatagacccaagaggctacacatatactgaataattcaatttatatgacattctggaaatgtcaaaaaaatgatgaggaaggagaacagatcaatggttgcctggggttgggaatggaggacgagttgactgaaaaaggagaatgtgtgggattttggggagtgctgaaaccattgtgaatcaaatcccgtggatctgtacaccacaaagagtgaattttactatatgtaaattttaaaataaagaaagatatataaatagaaacaccaaagatttcatccataatatttcactatgtaactggaattgtaatccagtaaaatagctacaactaatgtatacaatcatttctaagaaaactgaggagaagttgatgctaggaagagcagcagaatgctaggcttcatttattttccttccttcccttccttccttccttcccttccttccttccttccttccttccttccttccttccttccttccttccttcctttctttctctcttttccttttttgagataatgtctcactctgttacccaggctgagtgcagtagcacaatcacaactcactgcagcctcaaactcccgggcttaggtggtcctcctgcctctcggcctcccaaagtgctgggattacaggcatgagccacctcttctggccttgattcttcattaaatatagccgcctcacatagagtgcttttggtgggtatttttttgtgtacttccactggtctctgggccatgtacctactttctgctgcacatccactaagaagctctagttgcttcacacttcaacttaataatgatcagcagatcaccaagtctccggagaaaagggttagaccacttgttaagtcaacaaacacatatttagtgtttatcagattcctaaacacttttctaggcggtggagattcatcagcttaaatgcatagaattcaccctctccccagcagctttaatttggtatttatagcattcagtagttaaaaatcttcaccttggacttgtttacctaccaattactgcacactttcaaattgggctgaatttcaactggtaattaaagttgattttgaaagcataaaaaggcagtgttaaaaaatcccagtatcaactgggtggcctcagtcattttcagtgttgttgctcaagtttgtgactcaaaagcacttggtactccacaagttgaaattctgggaactgcttgacaatttcagttagctataaaattttgggtaacaagcattaatttgtttatttgaagataatatatagaaatgagaagtgctgcttgtgagatcctggggggacactaggtaagaacattccatcttttaggaacaaactattaatatgtaacagatatgttaacaattatttagccaggcaaaactattctgagtgcacgggagttagcagttctctacacctttgagaaaggacttagaatgacaagaatccatttttccatcctagatgagagtctgtgcaggaattgatttaaaaaaaaaaacacactaagggggtatattaaggacacattaagttcctattgctgcggtaacaaattactacaaacttaatggattagaaaaacctaaacctattaacttatatttttgtaggtcagaagtctgaagtgggcttcactgagctaaaaccaaggtgttggcagtgctgcattcttttctggaggctatgggagttaatctgtcttcttgcctttcagttgctagcaaccttttgcattccttggcttatgaccctcttccatattcaaagtcagcaatggccagccagtcgtctttctcacattacagcattctgatgttgactcctctgcctttcttgtccatatttaagaacactgtgattatggtgaacacacctggatagtccaggataatcagctgatcaaccagtttgattccatctgctatcttaatttccctttgtcatgtaatgtaacatattccccaattctggagattaggacatgggcattattgggaatatatatatacacacacatatacatatatgtacatatatacatacatatatatacatatacatacgtgtgtgtgtgtgcgcgtgtgtgtgtgtgtgtgtttgtgtatgtatttgagacagagtttagcttttgttgcccaggctggagtgcaatggcgtgatcttggctcactgcaacctccaccttccaggttcaagggattctcctgactcagcctcctgactagctgggattacaggagcccgccaccatgcctggctaatttttcatacttttaatagagatggggtttcaccatattgatcagggtggtcttgaactcctgacctcaggtgatccacccgcctcggcctcccaaagtgctaggattacaggcgtgagccactgaacctggccaattgcgaatatgttattctgcctccaattcattaagaattgtcactctctgtgataacatgtaacattggttgatgtgttaatcctaagccaagaaaaagttgaaaataatgccaggatgttgactggcttcattaaggtcttttattttatgctgcatgaaatatgttaagacacttcccatgtaggtcaccctttaaaaaagtaagcaagtcaatggacgacagaatacaaacaacctaaagttagttatctattctctcacccttcccaggcagctcattcaccaccaaaacaagatcattgacctccagttccattttgtccttaactgatggcacgttaaggagtctgttcgcaattaggacaacgttccaatttctttgtttcaacactaataaagtggtctttcttacatctttcttgcaagaattgcataaagctcttgcttgagaggaaacttggtttttgtaaggcttctgcatttgatacctgatgggatttcctggtttgaggaaattttaaccagatttagctttttgattttcatttttcaaaacagcaatttaaaacaacacaaatgagaaccatgagtatttcactattttactttgttgtgaggaattcaaaaagaatgaatgtttcttaataaaacgcaaattatttaagtttaatttggatttcttagccaattaccaatttttctcatcctaagggagttcacttgggagccctcaaactgtattggagtttttcgattttgtgacttaaaaaaacgaaaaaaaaaaaaaacttagcaaagagtgatttcatgctttaaaagacgatgaaaaatggttgtgaaattaactcaaggtttttcagacatcaaacagttttgattttctttatttctgaccccataaatattttcatgtgctaagtgcgcaagcatcaaaaacatataaattaaaataaatgttcactattgaacaaaaaaggaaagggcttagcaaaacgtgatgcctctgaatagacaagactggtcaggaccaagggccaccagctttcaggaatttgttctgaagtcagtcagatgattcagattatcaaggtagatattacaatttaaccatgaaaaatctgagcttttgcccttattctttagaaataagtccccagagttttagctaggattataaatatcttaaataagacaattcttccaagattcctttgcagttagtgtgcaccagtaacaaagttcggccagtgatatataaatgaaagcaatggtgtaacttcctggaaggaagagacatgttcttttccctttcttttctcctccctcaggagctgcaacaatcagtttggaccaaggtgtagagaatggtagtgttgcaagattgaaggaacttaagtgcatgaggattaagtcactgttatattttctattactcataaccaaaccggatttaactaattcagttagctactctgaaaactaacaatatcttaaaagtccgctgtgaggacgaaatgagatcatgtaggtaaaccatctatcttactggaatgtctacagaaggtaaaataaatgttaattatcttctcttttccatgataactgaagttttaaagaccttcatccgtgaaaatatctcaatgagaatgatcttcaaagttaatggaaagcaatatttttgacttggaggtagagatgactttagaaggacaataaaaaaacttattctgtttcttaattcatccatttacataaatttattcaacatattttaagtactgattatactgcaagcactgtgctaggaattatcatttaaagtaaaacttacgttttgcctgtggtaagctcaaattccatcaaaaaggcagacaagcagtaatgaagatatagtatgacaaatactattgttagaaatattcacaaaaacatactatgggaatagaaaagaaagtagctcagtctgtctgaggaagcaaggaagattttatgaaggagaaattgaacagagagctaaaagagtgaattgatatttggtaggtagtgaagggaagaaaactttttttaaaaataaagagaacaccatgttggagcatgaaatgcatatttagtggataagggtgtagttttgcaaggctggtgtattaggtgtggaagtattctgagatatggctaaccagtaggttaccatcagattgtgacagaagatagatctagtggcagcacagagaatacattatcagttcatatatatggggcaacatgaccccaatagaccatatagggtatatattcagggcatggtagaaaactaatatttcagcagaaatgggaaaggtgaaaatattcaagaaaaccttggagatgaaatcagcattatttgatgactctttgaatgttgtggtaaaagggaaaagtaagtctagagacctcttgggttactagacaagccaagccatgtaaagccattaagcaaaatagaaaagatggagacatgaaggaagatgttttttagattaactaggttataatgaattctatttgtccatatgtcattgaggtgaagatattcaattgaaagtaggtaaaatgaatctgaagttcagggctaataatttctgagttgtatgagggtctttgaccaaatggggagagagagagaccagagaaggactgtgatcttccaagaaaagcacttttagagtaagacagaaaagctgaatcctgaggaatacattatttaagaaagaaagaagctaggcatacccaaaattggctcagaaattaaggaagataacaagaaatgttttgaagttaaattatgcaatggaatgcttcaatattcagaatattacagaatagtatagaaatttgtattagacacctctgcacttaccactgaggtttaacaactgttctagaaattttacagttttggttctgaacattttggcctattatctattttgagttgtttttgtatatgatgtgtgataagacttgagtttctttttaaatttttaaatagttgtttcagcacaatttgtaacaaaaatcatcttatcctctgatgaaataccttgacaccttcgtagaaaatcaattgactacatatatgaatctatttttttgtactttctgttctgttttgttgatatctgtatctttatactaatagtatgttatctgagttattatagctttatattacaagttaaaatctggtgatttaagtctttggactttttaaacatatatatatatatatatatatatatatatttgctcctccaggttcttctgaaggccatataaattttagaatcagtgtatcaacttctcagaaaaatttgttgggatgtaggctgggctagcattgaaatctatgaatcaattgggtaattgggtagaacatttctgttttaatattgaaacttctcatagaatgaacataaaaaaatctttattcagaattgctaagtaaagccacctgagccaggaaatttctttatgggaatatgtttagttagaaattcattttgtttaaatagataaatggttagctagaggtttattaattttattacagttttcaaagagccaacttctggctttgtctattttttcccctttttgttttctatttcattgaattccattcttatgtttatcattttcttttttctatttaccttgtattggctcttgcttttctagcttcgtaagctggaagttagattattgattttaatcattttaaattcttaggcattgattttaagtattaaatgcttaaaaggtggtattatttaaggacatgcattttcctctaaactctgctttatctgtgtctctcaatttttgatatgtcttctttacttttatttcaagatattttctaattaattttgctattttttatttgatccatgggttatttagaagggtattaattaattatcaaatattttaatttttctagatacctagatattttgttattatgactattgcttttcaatttaatttcattgttgtcacagagtatgcaatgtattggtagggcacggtggctcacacctgcaatacaaagcactttgggaggccgaggcaggcagatcacttgaggtcaggagttcgagaccaaccctgtctctgctaaaaaatacaaaaaattagctgggcatggtggcaggcacctataatcccagctactcaggaggctgaggcaggagaatcacttgaacttgggaggtggaggttgcagtaagcagagatcgtgccactgtactccagcctgtcaacagaaaaaaagaaaagaaaagaaaagataaaaaacatgcaatgtatgatttcaaacctttgaaagttattaagacttgttttattatcctgcatatggtgtttggttcatgtgatccagtatatagtttattttggtgatgtggtttggatgtgtgtcccctccaaatctcatgttgaaatgtgatctctaatgttggatgtgggccctggtgggatgtctttgaattatggggccagatccctcatgaatggctcggtgccttccccatggtaatgagttcacatgagatctggttgttaaaaatagtctaggagctctcctatctcttgctccctctctcatcatgtgagatgcctgctccccactttgccttccaccataagtaaaagcttactgaggtttcactagaagctgagcagataaagtttctgtgcttgtatggcctgcagaaccacaagccaaataaacctcctttctttatacattatccagtatcagttatatcctttatagcaacacaaaacagtaaacagaaaattcatactgaggagtgaggcattgctataagatacctgaaagtgtggaagcagagacagggagatgagagaaagtttggaaattcttagagatttttaagtgattgtgaccaaaatggtggcagaaatatgaacagcggaggccaggctgaggaggtctcagatggaaatgaggaatttattgggactgggaataaaggtcattcttcttaaggcatagcaaagaccttgactgcattgtatctatgctctagggatttgtggaaggtcaagcttaagaattatgacctagggtgtctggtggaagaaatttctaaagcgaagtattcaatatgtggcacagctgcttttaatagcccatgatcagacatgggagcaaagacatgacttaaagttggaacttctagttaaaagggatgcagaacataaaagctttaaaaatttgcagcccgatcacatggtaaagaaggaaagagaattttcaggagaggaacacaagcagactgcagagcaactatttgctaaagagattggcatgactgaatgggagccaagcactaatagtcaagacaatggaaaaaaggtctggaaggcgtttcagaagtcttttggacagttttttccccatacagacccagaggcctaggaggaaagaatagtttcaggtgccaggcctgggatgccactgtcctgtaccaccttaagaggctgctccctacatcctttgctgctctagctccagctatggcttaaagaccctagacacagctcaggcttctgccctggagagtgcaaaccataagccttggtggcttccacatggtgttaagtctgcaggtgcacagaatacaagagtaagagaggcttggcagcttccatttagatctcacaggaggtaggaaaaagcctgggtgcccaggcagaagcctgccacaggggcagagcccccacagacagcctctactagggcgatgccaaggggagagatggggttgcagcctccagatagattcctcaatggggcactacctagtagagctgtgggaagaaggctactgtcctccagaccccagttgaagagccaccagcagcttacaacctcagcatggaaaagctacaggcaccagactccaacccttgaaaacagccatataagctgcgcctatcaaagccacagggccagagctgcacgaaggccttgggagcacaccctgcagatcagtgtacccaggttgtgggacatggagtccaggatcatttgggagctttacgattttgggtctgccctgctgggttttggacttgtgtagggcttgttgcctttttcttttggctaatttatccctgttagaatgaggatgtttacccaatgcctgtgccaccattttattttgggagtacataacttgtgtttgatctttacaggctcatagatggaaggaacttgcttctagtcatgctggaatgagttaagattttgggaggctgttgagaatggatggttgtattttgcaatgtgagaaggacatgagatgtggagggccaggagcataatatgttttgatgtgtatcctttccaaatatgttgtgtatcctttccaaatctcacgctgaaatgtgatccccaatgttggaggtagggcctggtgggaggggttttggtctttggggctgatccctcatgaatggcttggtgccctccccatggtaatgagttcatgggagatctggttgttaaaaaagagcctgggattgcccccatctctctcttgctccctctctcatcacgagacatgcctgcttccccttcaccttctgccatgagtaaaaccttcctttctgacttcttttctggcttctcacttccaccagaagccaagcagatgcgggtgtcatgcttgtaccatctggagaaccatcagccaaataagcctctttttaaaataaattacccagtctgaagtattcctgtagagcaacacacaatggactaaaacacttgaacattcagtttgcccttgtaaagactgtattgtgtagctattgaatgcaaccaggaaaaaaaagtaatggaatatcttgaatacctttatgccaatcaatctgacacttagatgaaatgaacaaattccttgaaagatacaaaccaccaaaacgaatgtaacacaaaatagaaaaatctgtatagccacaggcagttctttatacattctgaatatagtgcttttttcaaattgataaattgtaaatattttctcctgggccatggcttacattttcatttttcttattggtgctcactgaagagaagatgttctaattttgatgaagtctgatttatcaattttcttcataatgttttcgcatcctgtcttgtctatcctgggtagggaatgtattctctgtcttcttctagagctgttttacatttagcttttacattcttgtttatacttcgtcttgaattaaattgtgcatgcagtgtgacaagtctcagctacttcatactacacataatgcagaaagccctctagggaagatactgtattaaatgggactctcacccagtgtgacttcctcctttcaaagatccaaagccccctgctttctgcttgtttcctcactctacagtgccttcaaaatgttttttacattttgctcagcttctaattgttattctcaggcatatcattccattccaccgctgggctcaaaagttcctgagtctctttttaaaaccacatgtctgactgtatttaaaatctccagcaattctgaaaaatttccagctactctccatttaaatatttcttttattctctgttctctctactttctcctgttataatttctattagacatttttgtacttccttattctgtccttatttctgttaatgttttatattctgaatttccttttctctttatactgtattccgaataatttccccagttccattttccagattactaattctcatttcaacagcagtttaatttgtccaatgatcttttttcttgctttgatcacatatcttaattctggacttccctgtctttccccaaatctgtttatttttgtccttgtgtttttattatttattttatatccttaactatttgacttatatctgtgttacagtctttttacatgattctattacttcaaattttatgtatactaatatccctgtttgttgatccaacctcatgtattgtttcttttatcagtttttattgtgggcaccttcagcagaggttgatattttatttttctcggtgaaactgtatgtgctttcagtttactctgcagtttgctcctgaaatttcaagggcttgtgacctgtctgtatgttgatttctcacgttggggaaacaagtaccatgtaagtatcataaactttgccccatattgatatattgtgctggtctgacatgttttatttccaataaaaaacttaattgtctcctcctattaagaagatcacaggcagatatgtgcatttttaatgtcatattcatagaccattgattaggttatatctagcacatgtcttatagtgggtcaaagctagacctaacctatctgatgtaagggtctcagttctaattctcaatcaaatgctagatccatgcaacctctatattaattaaaatatcagcctctagtctctatgatctatctctagtctcagattctggagttcctagtgcatccattcataaacttatctctctgactttagttgcctctttagttctggaacctgaaaatttgtctttttttttttttttgtcatttgagtgcagctgtacgactaatcaaatattcctgttgcagtgagaagaaagagtctctaatttccagtaaaacttgaagttcccattagattttagattttattagattttgtttttcttgaaggcatgtagtggtatgttttatttatatgtttatcttctgtcgcacttagtatagtagtataaaactccactgctgcttaataaaaataaaaaaaatgaaaaaaggcatctttaaatagtaaaggctaaaagagaaggcattcatgttttaaatagatgaattctctctcccaacctcaagtagtcaaaagagttaggtggtgggggcgacatatggtggacgttattcccttccttggtactgtatcaacaattgcaatgtactgcttcatttcaaaaagaaaaaaagtaccatgctggttgctgtccacagaaattctgccaacatcctagtggttgctggtttgtaattttatgggtttccagagaatcaaacactgtattattatgtttggctactaactcgggtcagcagttcaaaaggagaaagaaggggagtgaaatgggttggagggaaaagagagagcacacatgacctggtatatttaaaacaatagatttaacgtattgaatttgaatccatctttactgaatctcaatttcatttttaacagacaaaaattagtctatgttaaaagctgtgttttatgtataaatagaagatgtggccattgtgaaccagttttaattttgactggagaataaagtaataggttcttttttccatggatatccttttacaaagattttgagatgggagatttttattcaacaatgacaaaaacaaatagatttttgaacatacccctgatcctgaatccctctcctttcacaatatacttatttacttaaatataatttgtagaaatattgacattaaatactacaattataattattgctattatttaaaataattccgtaattatggagcgattaaaatatataaactatgtgacgatcttaaacaatatgtgcattttttcagaaagtgaactttgtattattaatataagaaactctatgtcttgaccatatcattattgaaatacgtttccttgatattttctttagtcttcgaagatcataggtatacatgtaactcttctaacaagcatagcatgaacaatcttcttataggaccaagaagaagtcatgtttgatttctttgcatagtttgtttatttgccttggattcagaaggagctaggagaagaatgggtaaaatagtgtgattaccattgtatttaacataatacaaatggatgaatcctggatctactgcctgtctttcctgctccgttctcacaataatcatttagtggtatgagctccctagttagctggctgcctaagaggcccaaaataaacaggaaggcattgtgcactggcattagaaaagcatcagacacgttaaaactgcttattattactatttaaggtaaaagtgcacataggtgaacgtattttattaatttatctattatattaatattctattattctttcatcatacgagaatttgtggaacacttattttatgttatagacactaggaatgaaatagtaaagaaggaaaatttgcttccaaggaacatccattcaggcataaaggtataaaaagcaaggaaataaatgagttctgtggataaaatagagataagacccaggagcggcttgcttgtactggaagaacagagtggttagagatggcctttctcagaagataacatgtatccaggcacctgaaggacaaaagggaacctcttgtttaaagattgaagaaaggcattcacagcatgtaaacagaacccaggctctcccctaaacatctttgggttgcatagtgacagtacaaatggtggcccacacaccctcatctagttaaaagttataaatctagctaacaaactgtcaatacaatattttctattctcccaccttgacacgttgccttcataacagcctggaaagcctgctttgaatatagaattcttgcctttcttgaaattttttgttggcacatggcagcataaaggagagctaaccctatccctaggcctgttccccaatctcttctcatccctgggtccttcctacaatgtaagaagcctccacgtttcatgtagatatcctagtccatacattgaaactctgtccacatcctactctcagccaccccttggtaatctctggagcccagagggtgcatacacctgtggtgtgactcctcagcctctgaagatcagatttagggaaaaagaagaggcctgtgtaggtcgtggaagcaggctcaggaacatttaaggagaaaatcttaggcctttgggtataggtagtgtggtctaaaggggagaggttgtggataccaggagggcatgaccctttcatcctgtagactcctagccctgtagaagggactgaagctgatgggaggacagagtgaggctttctacacttttaggctcaggacagcaacccttcttgcccaggtctaacatggtaattaaccagactaaagaggtttttcagaagaagtattgtgcacaacttatgtgggcttggtcatctgagggggccaacagaacaaactccatgtcaacattttcaacctgtctgaccttgctgaaagtcttcccagatccaacacctgtgaatgctaaagttctggagctgtgactgaggttgggacagtttagaaaaatcaaaaaggctaggatgcctggatggagtgaacaaggagatggagtagagagaaaagcaggagccagaacacacagggactttttggtcatctttaggagtaatttttcccaagtataaaggaaggttgttaatttgagcataatctactatgcttcaaatttatcttatatgaacatttttgtctgctaaaagtgatcctctaaaatggtggactgggttgtggattcgaaggaatagtttctagttaagcctgtggcaccacttttcccctctccaccttccataaaatagatattcttactacaagaacacctgcatggagaaagtattaccagatccatttcatgggtaagacaatggaggctcagagggttctatagagctgcagaatgaaaaacagttagggacattgagacttctgatttgagtcctgagtatcctgtatgttggccatgcctcttcggataagttaacttctctacacttaattaataactcatctgataaatagtgataataatagtattcactacatgaggttgttgaggtaatttaaatgaggtaatgtaaatagtgcatttagcaaaatgacacataaagtatggtcaatgaacatttgtttattgtaattactgctactaccactacaactaactccactcattattatttagggctatattataaacaattaaggaaagttacatttaggtttcctgattcaaacactagtgccctggcaaccttaaatgtggctatttaatcatacgcacacacacacacaaattaaagagcacccctatttgtagataaccaccattatattatgaagggtatggtatttcataattttgtaaaggcaaagccactcctctgtctgtacaatctcactcactgtgaagctggtttggaatcagcagctggaggaagctctggagtgttctcacaaatgaagtgtgacagctctgaaaatataaagcagtgagctacaaaaactaattataatttatctttaggcttcagagcttgaggttcaaacctccctgtctctgtctctcacacagacacatacaaacatacatacacgtacacacacacatttatacacatgcacatgaacacacacatacacaccgtcattagacatatgtgcagtgttttctatattgacctcttctctcttcaacccactttggtgtcctacaattataatcaataactatatatagatgtgccacacttgaaattccaacatgatggtaaatatcctttccattagacttcgcattatatccatgaaagttgagtggattaggatatggtaagaaggttgttttttagaataaaatattttgttcttagacattctaccaagacattgtattgcttctgggaaaacttctagccgttgtgtgtggtaagaattttgagctcaggccgactgggatcaaatcctggctctctactagggcaagtttcaaacactatgaagctcaatttctttttctgtagggagaactaccataaataactacttttgttattgttaatatttattattattattattattattattattattattacttgcaaccaagactgagagagtctgagaaatctgtagtaatccaaatccaccactcaaggggaaactatttgatgaatatcttaaagaacaagttctcagcctaagtttctcagagagcaaagcctggggcaagggctgtgtgtgggcagctcatttttggaagcaacttcagatatgaggagtggagaactggggaaaatgagtcaaggataacagagaagtcaattaataggaacattcttaagttaatctccactgggctcagtagttccattgcctgtccctacagtgttcctctaagcaactgggtataatacagcttacaattgcccatctgaaagaagaaaagggtatttatccactagcttccatctcccatgttcaagtgttggcccatggagcagcaactccctagagcatccaggattcatgtgtgttggtgctgggaatgtttttataatcatctcactgtgtggatgtgagagagggcccatggcagaagtgaaagatacttgtttcagctgaagaaaggggctgtcagatcacactgctgctagctggctgcccatggtcctagtaaaagatgaaccaggaggatgtgagaacgggcccaaggtcaatcttctacaagcattttctctaacaagaggatcatagtaacaatggctgagtagccatctttactaggatttgcaagaatatgaactgcttataaattcagatagtcattaatgtctttgggggatagaaaatggaagcaaggccgggcacagtggctcacggctataatctcagcactttgggatgcccaggagggtggattacctgaggtcaggagttccagaccagcctggccaatatggtgaaaccccatctctactaaaaatacaaaaatcagccaggcgtggtggtgggcacctgttatcccagctactcgggaggctgaggcaggagaatcgtttgaacccgggagatggaggttgtggtgagccgagatcgcaccactgaactccagcctgggtgacagagtgagattccctctcaaaagaaaaaaaaaaaagaaaatggaagcaaatgcatgatttcccctcttctatctaatgtaaagtttttcaactttggcactatttacatactgggctagatacaatttctctgtgggctgggctggcttgagcactgcagagtcttggcagtatctctggtctctatctactagatacctgcggcagttttccctccttcccccacccagtgtctccagaccttaccagatattcctaagtttcaggcaattgcccctagttgagaaccacttatctaataaaactgagatgtttctcccacctcccattttctctctactctccaacccacaaccaaggatccccaaagctgttctactgtggcccatgcacaagtgtctcatatctatgacttgcacctgcatcctagtgacctgaaccaaccaaggtttttctctgcagctctgttgactagaagggctgtttaaagcaacttgatggggccagtgcaacgggatgtaattaagagcagttaaatcgaagaatcttctgaaagaaaaaatatgaagggattactcaaataatttgtcacaataagttatgtttaaaaatatttttatgtgtttttctccatgttaaaacatccgtcatttcaaaaggaacagttgaaagagtagtttagaaggttttctttggtaagcatacaccagaccagcaagttaaggaagataatataagtctccccaggaacaatttttcccctttcaaatgttacatgctttttattttatttatttatttatttatttatttatcgagacggagtctagctctttcctccaggctggagtgcagtggcgtgatctcagctcactgcaacttgtgcctcctgggttcaagcaattctccaggcacagtggctcaggcctgtaatcccagcactttgggagaccgaggtggatggatcacctgaggtcaggagttcgagagcagcctggccaacatggtgaaaccccatctctgctaaaaaaaaaaaaaatacaaaaatacaaaaattagccaggcatggtggtgaaagcctgtaatcccagctacccgggaggctgaggctacatcctttttaaagtaaacttttaaattgagaataaattttgatttacagaaaaaaatcttgaaagtaacacagaggcttcctataagctatgcactcagttatccctatttttaatagctgacattagtatggtaagtctgccacaattaatgaatcagtattaatagtttaatgttaactaaagtctgtgctttattcggatgtctttggattttcccctaatgtcctttttctgttccaggatcccatccaggacaccacattacatttactcaatttactcatcatgtgacctcggaccattcttgactgtgacattttgtagcatcctttttaatcctgggctcctaagtcgacaggcatcaggtaaatctcaaggcatcttaggtcagagcagtcatgattagggatgaggaaacaagggctgaggctttgctatctctgtgtacataaggggaatgctagataattggaatttgattagatagctctaatgtcgaaacaataaaggatataatttcataactaggcaaaatgttcctagacacaaaaagactttctgtggctttggatcttggtcctagcctccctttttagcctcatttatttctgttcctcttatgtcctaagatcaaagtgtccatactagtcccgactcggtgctagatatgtgttttaaatttgtttggaatgtgtttcccctacatctctacccattgacatcctaagcatttctcaaggtcacctcctctatttgtcttcctgacagtcagtaactccctcatctactctgctccagtctcagcttgtgcttttcccagttaattttgcattccacgtaggcgcaattaatattaataataatattgggtggctgaggcaggcagatcacaaggtcaggagttcgagaccagcctgaccaacatggtgaaaccccttctctactaaaaatataaaaaaattagctgggagtggtggtgcgtggctgtaatcctagctacttaggaggctgaggcaggagaatcacttgaacccaggaggtggaggctgcagtgagcagagatcacgccattgcactccagcctgagccacaaagtgagactctgtctcaaaaaatatatgtattaataataacaaccacacattgcatttttaccatgtgccctgtgcaagaacatacacttccttgtgtaatctccatgacaaccttagagggtaactactagttacccccactttacggaagaagctattgaggcataacacatttaagtaagctgctcattctctcatagctaggaagtgggcaagcaataccttgaggtcgaatccgtctgattcttaataaggtctgacagtagtgcctatttattctagcttctcacatgactctgctaccaccttccttgatgaaacccactattctccattctacaatagcctgtaaactacttagaaagaggggttccattttattcataactgcatgcacaaagctttatgcatttaaggccttcagtaaaggattactgaaatgattttcttaaattaaaagaaaaatagtaacgttattgtggcctgtaagcttgaagctggcagctctgaaagcaagttggaagaatgcgcatgggaggagaaaagctaaaaataccttctcattaaagtaatgatcagaaataccagtgaactttgcgaagagaaattcttcaggttctccagtattagacggcactggggctgaggtctaattgtaggaaacagtgccctgtccagggcttttctcttgcctacactggaaaatgacaaggtgtagtggaatgcggtctgcttgggatttggggattcagcttgcagcctgccaggaactaactctgtgacctccagaaatcttcttaatctttccgggctccagtttcctcacctgtaaaatgctggtgaaggaccttgggcaaactctaaagattcctccagctctaacattctatgattttagatgtaattatgtgactcctggaagcaatattcatccacacaggctttctggggaaaaaaaaatgggaaggaaaaaggaaaagaaaaacacttccataaaagtatttatagtacagccagtgactatgaatcatggcataattaattctcttttataaagttgccttgtttcctagcagtgcagtaattcccaagccctgttcaacggcagctccattgacagatatgccactttccttgtctctttgcagtgaataagttcaaaccatccagactaatctctgagtctctgccagctccaaatgtctgtagctgaatgagtctaatcatctgtgactgactgacagatacggttgctaaaggatataagatatatgtgatctatcttgactttaacgaagctctggattaatttcctcacattagttttgtccatcaagttttaatattaaatgctttataatttaatcatgatttgcctagaaaaatcatagccataggctgatttgaaattgctgtgtgctaatcctgtagttatggtagataacaaaaatccttttctgcaaaaatattcacacatccatttcttaaatcagattctttttgggtgcagattctgataacttgtcttcctaataacaccttcccgatgaatattttctcataaaacatttttctctaatctcagatctcattctaggattctttaaatggcatgcaaagagctacctgcaagtattcatgccagagagctagatgtcatcttcattatgttttatagtttggttttatttactacacgtctaccaccaaaattgaattgagaaaccatgtattttcagtttcttctccctaaattagggaactgaggaattagaatgcagttaacagcagctaattttatgttgagaaattctactgaataaccaaagtgagaagattgatctgcccatggaacttattcatgaactttctctcaccatttattctcatcttatttctcatttgaattttggtagcagccatgtggataaaggatgatgcaaatacagtttggatttttttctttaactttgagtaaggtggcttgccttcctgatactggtttttttcacatgtaaaataaagaagttgggctggttgacttctgaagttatgtaaaaatgagtgtctaaggtaaagatttcacagagcaatctagatcaatctattctataacgatctaagctgattcacgtcctaaaacaacagatttttagggatcattttaaaattcccttttaaaatagtttttattttgaaggctatacctttgttgtatcctttattggtaatactacataaaatactacataaaattcacagggtagtgaatttatccaatggaaaactcatcatccttttatctaagatagtaatagaattttacgtgggccacaataaaagtctaaacatttcagtcactcagaaaataatcagtctcctataactgtccccgggaaagagagctatgagccagacaagaagtgtaatccttggcagaaataaccagtttactgaaatcagggtctttagcatccacttgaccccacattgaacagacttaaaagcactgaaggatttccagcttggtagcttgatctgcctatttcattgctttcagcagatagtagtatttaaaatgagctctttagagttgtgtctttttttttttttttttttttttttgagacagagtctcgctctttcgcccaggccagagtgcagtggcgcgatctcggctcactacaagctccgcccccccgggttcacgccattctcccgcctcagcctcccgagtagctgggaatacaggcgcccgccaccgcgcctggctagttttttgtatttttagtagagacggggtttcaccatgttaaccaggatggtctcgatgtcctgacctcgtgatccgcctgcctcagcctcccaaagtgctgggattacagttgtgagccaccgcgactggcctagagttgtgtcttttaattagaaatcctatttgaaagcagagaacattgcagttacagaaaacaacaaatacactctttctggttttaatactattttcttttgtgagaggaaaaaaaccatctgtattaatttatatcgtatgaagtaaatcttataaatttataaagaaattctccagtgttatctgtaaaaggaattattttgtactgtctggagggcataacctcatctgatttcataatgaagcttatagtaatctgtatatacaagttgagaacattggagaaaggggtgaggaatgcacaaatgttgcacaaagattgcaaaggaaatattgcatatttaaacaactactgttccatacagcagcacaggcctccaatgccctctgtaatgatgtacaatgggaagggactggcaggtctcagtagagtccaggcaactttattttctgaggtaagtatctaattatttcccaggctgctgaacatcaatgaatagacatgctgatttctcactttgcaatgtctctcgtgatttccttgactgagtggataaatcagccggagttctgaagctgtaggttcaatgtggcaatttttttatttctatctactacaaaaatgaattccaactaggacttatttagagataagagaaacaatttctgattggtgttgcctaatgcgctagttaattccaatctttaatcctgccctgttggctcaatctaaaagagacatctttttttttttttttttttttttttaatctagggcatgtcgttggttccagttgtcttttgtaatacacgctttgtctacctggagctggagagaatgagaacaataacactgagaagagaaatagaggtatatttccttgtgtcaaaaaacaaaacaacaaaacaaaaactctactaattcaaaactaaacaaaccaacctccccctttgcaggcagggacacgtgattggaagcagaataagaattgttctcccattgtatgttggcactcacataaaaatagagtttgtactctatcattctttaaaatgaagttttatactaatatgtctgtttatagttctgtgggcatttaggttgattccatgtctttgctattgtaaacagtgctgcaatgaacatacacgtgtatgtgtctttatggtagaatgacttatattccttggacatagacccagtaatgggactgttggattgaatggtagttctgtttttagctccttgaggaatcgccacactgctttctaccatgtctgaactaatttacactcccaccaacagtatataaggattcctttttcttcacaacctggtcagcatctgttattaataatagccattctgactggtgtgacatggtatctcattgtggttttgatgtccatttctgtaatgaccagtgatgttgagctttttttcatgtttcttggccacatgtctgtcttcttttgaaaagcgttcattcactttgttctttccccactttctgatgggtttttttcatgtaaatatgtttaagttccttacagatgctggatattagacttcagagctacaataaccaaaaaaggcatggtactggtacaaaaacagacacacagaccaatggaacagaatggagaaccaaaaaataaggccacacacctacaactatccgatcttcaagaaacctgacagaaacaagcaatgggggaaggattccctattcaataaatggtgctgggatgactagttagccatatgcagaagatggaaactggactccttcctcaaaccgtgtacaaaaattaactcaagatagattaaagacttaaatgtaaaattcaaaactttaaaaccctgggagaaaatctaggcaacatcactctagacataggaatggcaaagatttcatgacaaaggcaccaaaagcaattgcaacacaagcaagaatggacaaataggatctaattaaagttaaagagcttctgcacagtagaggaaactatcaacagagtgcacagacaacctacagaatgggagaaaatttttgcaaactatgcatctgacaaaggtctaaatccagcgtctataagaacttgcatagcttgaatcagtcctgcatcccaggaataaagcttaattgatcatggtgaattcactttttgaggtactgctggatttggtttgctagtattttgttgataatttttacatctttgtttatcagagacattggcctgaagttttcatttttgttgcatctatgctaggttttgatgtcagaataatgctggctttatagaatgagttggggggtatttcttctcattattttcttttttttttttaaatagtttcagtagaattggtactagctgttatttatatgtctggtagaattcagctgtgaatccatctagtccagggatttgtttgtttttattactgattcaattttggaacttgttattggtctgttcaggattttaatttcttcctggttaaatcttgggaggttatgtgtttccaggaatgtattcatttcgtctcagctttctagtttgtctgcatagacaagtttataatagtctctgaggacttttttgcatttctgtggagaagtggtaatatcactttgttatttctgattgtgcttatttgaatctcttttttgtgttaatctagctaatggtctattaatcttgtttattctttcaaagaacaaacttttggttttgttgattttttttgtatgaactttttcatctcagttttgttcagttcttctctgattttggttatttcttttcttctgctagctttggggttagtttgctctagcttttccagtacttccagatgcaatgttaggttggttaatttgagattcttccaacttcttgatgtaagcattgagcactataagctttcctcttaatactactttagctatctaccaaagattttggtgtgttgtgtctctgtttttattagtttcaaagaactttttgatttctaccttagttttattatttatccaaagtcattcaggtgcagcttgtttaatttcaatgtaattgtatggttttgagatatcttcttgttattgatttctgttttattgcactgtggtccaagagtatgtttggtatgatttctattttttttttttttgaatctttgagatttgctttacagccaagcaggaggtcaatcttagagtatctgtcacgtgcagataagaagaatgtatattctcttgtggtttggtagagcattctgtgtctattaggtccaattgttcaagtgttgagtttaagtccagaatagctttattaattatctgcttcaataatttgtttaatcctgtcagtgggatgttgaagtctcccattattattgtgtggttatctaagtctctccataggtctccaggaaattgttttataaatctgggtgttacaactttgactgcatatatatttaggatagttatgttgttgaattgaaccctttatcattatataatgcccttttttgtcctttttgatcattgttggtttcaagtctgttatatctgatataaaaatagcaattcttgctcttttttccaatttgcatgacacatatttctgaaatcttttactttgaggttatcagtgtcgttacatctgagatgagtctcttgaagacagcagacagaaaggttttgtttcttttttcaacttgtcactctatgccttttaagtgggcatgtcccacttaaaatggggcattgttccatttacattcaaagttaatactgataagtgagaatttgattctgtcattgtgttattagctggttgttaagtagacttgattgtgtagttgctttatagtgtccatgggctatgtacttaagagttttctggtggcaggtacctttctttcatttcatttatttcattgtttagcactcctttaaggacctcttttcaggcagttctagtggtaatgaattcctttaacatttgcttgtctgaaaggattttatttctccttcacttatgaagcttagattggcagaatatgaaatccttggtttaaatttctattccttatagatgctgaaaataggcccccaatctcttctggcttgtaaggtttctgctgaaagatccattgttagcctgactgggttctctttgaaagtggcatgccccttcgctctagctgcctttaagattttttcttttgtgttgaccttggtgaatctgatgactatgtgcctcagggatggttgtcttgtatagtatctcacaaaagctttctgaattttttgaatttgcatgttgacctctttagtgatattgagaacattttcatggaccatatacacaaatgcattttccaagttgcttactctttctccttctctttcatgaatgccaaatgagtcatatgtttgatctctttacacagtctctcacatttcttaaatcaaggctttttttcctttttctgattattttttctttattcttgtctgcctgtgttgattcaaaggaatggtcttcaagctctgagatttttcccttagcttggcctattctgttgttaatgcttccagttgaattctgaaattcccataataaattgtttaagtccagaagttgttttgttctttcttaagatggctattttatctttcaactcttggattgttttactgttgcccttggatggggtttcaaccttcctctgtaccttattgagtttctttgctgtctggattctgaattctatatctgtcatttcggccatttcaatctggttaaagaccattgctggggaactagtgtagttgtttggagataagaagacactctggctgttagagttgcctgagttcttgtgctggttctttcttatctgtgaggactaatataactttattcttttaagttgatatcctttgggtggggctgtttgtttttatgttcttcatttcccttgaggtatggtagattggcttcatttctagatgccttcagagggccaaggctcagttccacattcctgggttgcattctctaaatccaggcagctgggactaggctgatagctttgtcctctggcccctcaagatcaagcagtagctgtgctggggtgggggggcccaaggtgctcccaggctactgacaaaagcactcccttgggggctgctaatgaaagtgctccagtgtgatagcaggggctagctggaacaaaaaaacattccagcaggtggcagggggctgctggtaaaagtgctatggcagtggtcactggcaaatgtgctccagcagagcagtggaggctgcactgcgtgtccactcccaaaggagcctccaggtagggactccgggagggactggcagacaagggggaacatagatcatactcactgtggttccacagccctgctgtctgcaggcctgactgttagcaaaggtcagagccagctgggggagtatggagaaccttgggggataggcacctattgctgatttcctttgcagctatctccacaccaaaccccctgggctctgcatagactcaggctctgtctctgccgatgctccacgcagatctccctgtcaacttacttgtccataggggtcataagctctgcagccaagacacgggagatctgtggcaagagtaggttgcactgcagttatttcactcaccactatccttaggagtggctcagggtcaggaatgagttctggtgttcatcagttgcacacagggttcccaacttcctccttcttcagctcctgtgtctgcattgtctcttcattcactctcagcacattctgtcagaaggatctctatttggagtatactggtctgcttgggagtctgatggctctagatggaagaagctcttcctagctgtgtctagtcagccatctttattctttgtcttttgctctgtacagctagtcacctccaagacaataccaggaggatgttgcaaatcctctatttaaattttgtgactattaattatgtcaaaaaatttatgtagtaaggtaatgtattgtttcaaatagagtttaagttaactagagggatacatgagtaaggaaatcattttttccgcttcttttagctcattttcattagccaatctaattctacactcttaacactctcttagaaaaaaaaaaaagttctacttatgtagcttcaatggattgggaagtaacaagtggtaccaaaagttcattatatcctaattttccaccctgggtctcaaagcaatattgtcttatagtttaggttttttcccatgtgctggacatgatatgtgatggaaagaatgcttggtaattaaccttggatcataacttggcagctgctaggtctcccatctttaatagccattcacaagaagttgaattgggtcccaagctgtcatccaaataagcagaatgtgtcctaaggcagatcaaatctaattacagggctctagagctattccctttccattctccttaaaaagaggccactcatactgctccagctccccttacgcattttgcagcagtatcaggtggttcccagtaattcactgactcgtaaaccaaactgatagaagttctgactcttactagtccaattgaggtcctctggtaattgtcttctggtagaaagttgtggattttgcattattattgtgagacctccaattcatagacaaggaccacatgctctccttccatattctcctaaattagaaaacttcaatgagtgtgttatatatctccatcccaacaaatatttatcttccttggctttctagcatcctttacatttctccgtttccctaggcccctagcaattatgaaatccattaactataattataaagctccattaaaaatttgatatacacagcagttaatattcaccatctgtaatcttccaaatgaatatttgtttatttcagtacttcagctgctacatctaaaaatgaaggtaaataatttgacaagggcctcaaaagccctgaatattttatttcaactgagcagtatgtgacttcttaaaatatctcaggctctttctttcataatgcccctattgatttctttttttagaagactagaaagggaaaggatttaggttacaaaattcatacttatttttagtaaagtatttaaaaaccaaaaggtatcattagagaaatgctattatattgtcagtgcaatccccagttaatatgtgaggcactcaatttaaaatggtcaagagaaaaatcatcatcttcatcatcatctgtggaatctaacatactagttccagtcagaattcttgtttggaatagaaaccaacaaacccactctggttaacttaagcagaaaagggattgctcatcagatctataatagctctcagattcaagctggagaaccagactcagggagaaatcaaggaagtaaaggtgcagccaaggagtccccagtggacttcatggtatcactgttgacaaacaaacctttgatattgctgtctcttgtgccttcacccctggacactggctgctgctctgccagtatccactgtctctaaatattcgttgttatgccactgggaatctccagattacagtgaaaaaattctgactctataccttcacttctcttcctttttttttcagtttcaaatgcaggccacagcttctgattagttgagctgttaatatgttcagggtctaggttcccagatgtattaggccgttttcatgctgctgatacagacatacctgagactgggtaatttataaagaaaaagaggtttgatggactcacagttccacatggctggagaggcctcacaatcatggcagaaggcaaaagtcacatcttacatggtggcagacaagagagaatgagagccaagtgaaaggggtttccctttataaaaccatcagatctcatgagatttactcactaccaccagaatattatgggggaaactgcctccatgattccgttatctcccaccatgtcccttccacaacacataggaattatgggagctacaattcaaaatgaaatttgggtggggtcacagccgaaccatatcaccagaggaaaaggcaagatatactttatgctccttttgttttatagtagaaagtgtaattccacctctgtgtcagtctattctcacactgctataaggacatacctgagactgggtaatttataaagaaaagagttttaattgactcacagttcagtgtggctggggaggccttaggaaccttgcaatcatggcagaatgggaagcaaacatgtccttcttcacatgatggtaggagaaagaagtgccaaacaaagggagaaaagccccttaaaaaaccatcagatctcctgagaacttactcactatcatgagaacctcatgggggaaaccgccctcatgattcaattatctccacctgatcccactattgacatgtggggattattacaaatcaaggtgaaatttgggtagggacacagagccaaaccacatcaacctctacctatcctttgagtagccacaaatcttggtttgtggtaatagccatgattttagcccattgttcaggagtaatgatgaataatgctccctttattccaaaatgtattcaggtttagatgataaatgatgtgcttgtcttgcttatcaaaggatttcgcctcatattcaaaggatgtttagatgctgggaaatcagattttatactctttgtttctcacaaagacacaaagtgtgactgatgcttctttaccatttttcttcccacaaaatggggatggaaacatacttttgcatatcattatttcttgaggtactttcacgtttaatccctttgagcaagcagtcaacactaaccaaacacaaacattagcttctttcagaatctagtaatgcatcccatttacaggtactattcttattgatggatgaaaaaggtagagaataactaagttctctcatatgaaagcttataaaagtaatttatcacatatgcatctactgctaaatagtatcatttgtgtgcccaaagcaatatgtgctcagatgggaaagctttctagagatagtaactagagtagtttatggttttgctaatgtgagccaagtgggatcaaagggcaaagaaattattttccctccaccctcaattgggatggtgaccaagataagccatttacctgccatagcctgaaagtagtatctcctcctcttctccctgtttttctagccaattgcatctgaggcattcattttcttttatcatccacttcctggtaatattattatgctttcttgctatctagataatatgtattttgatggtccataccacttaagttgggtaccctttgaagtaggaaaccataccttgatcatcattgttttttttagtcacacctgacacagtgatttgtatgcaaaggttcttgatttttaacactataattaaaatgtaaccatgcacagtgtaatgtacataacaaaggttcaaactgtgtgttaaatgatcgaacataattccgagtaaaaagagccatttggaaattacataagtttctggagatactggatgtagaatcctcagtatcttataaactaaattctgcaaagaaatacattaggaaccttggaagatgtcttttttatatgttattctggaagatgtcttttttatatgtcatgctgttaatgtaatacaatacaggaggagcagtcttcttcccaaagaaacttactagctctctggaagttactcttgtgagtttattttaatggaattgcaccttatgaattttgattgacaaggactaccaactgtgacctttgtgacttatcttgatattttagttccttgagatgagtttgttcttcatcattgagaagtaataaactgaaaatagatgcctccacagagaccataatagagaacactttcaaaggggaaattgcttttgctcagagaaatgttctcaccattttacttttttgattgttttctcacaccttatttcacataggaagacgttttctttaattaccgtaatcaaatgtgcgctcataggaagtgactcaaaggaaaaaggtgtagactcctatgaactgataacatagaagctggtgaccacacaggaaggccttcaacatggaaacacaatgttagttttctgccaggatttcatggccaatgataaggcattgcattcccttgtacatatttacataacttcatgaaattgcttttaagtaaggcttgcaagatgcattacgtatgtggaattaacttatatttcattacattgtatggtttaggctcgttgaaatgcacagttttcctagttttgagtctgaaatgaagaagtaaatatttgttcattcactcagcaagtatttattgagtgtctactatgtgcaaggcattattctagggtctatagatacagaaataaacaagacaatgttcttttccagtcctggaatattagggtaacatggagaagatgggagtggagacataataaacaaatggacaaatatatatacatatataaaaaatataaaaatgttataatgtaaatatattttatcaggtcattgtaagtgcattggaaagcatgagacaaggagaagaataagacactgccagtgaaatcaggaatttctattttaaataggtggccaaagaagttgttctaaggaggtgctgcatgatataaaatcagatataggtttagtgagagtaacatcatgtggataagtgacagcagaattttctggatagaaaaatcgttgaacttgctgccctaagtaatatcctcttccaagaaaaggcaaggtgttcggacaaggagggtgagtgttacaaggtgaagtaagaatattagcaagaactaaatcatgtgcttatgcaggccttgatactccctctgaaagttataccaaattttttatatatatatatatatatatatatatatatatatatatatataacgtatacttatatatatataatgtatgtttatcaatgagttctctgaaacaccaacttttgtatcattgtaactgcctcttctatctcctttcttttcctcctttcttattccctttcaaatgtaccatacttgagcttttatgctacacctggtttttacatagaaaaggaatttaatgagagtgtgcctgtcactgcacaaagaatattcccatttgatctttacagctaccttcttttttttttttctgagacggagtctcgctctgtcgcccaggctggagtgcagtggcgtgatctcggctcactgcaagctccgcctcccgggttcacgccactctcctgcctcagcctccccagcagctgggactacaggcgcccgccaccacgcccggctaattttttgtatttttagtagagacggggtttcaccgtgttagccaggatggtctccatctcctgaccttgtgatccgcccacctcggcctcccaaagtgctgggattacaggcatgagccactgcgcccggctacaactaccttctaaggcaaggctgaggttaagtaaggagtcatgaggttcataagcttaaggctgtttgagctcctcctgttctgccacactaccaccatctccatggctcaagggatgaagtggacccttcatcatctcacctgaaaattgagtgggtgggctttaccccaaagggtatatgaaaggttgaccttggactcgtatcctaaagccagccagactattttccagttgtatccagtccttcctcacttcccttgtctgctgccagggggaagaattctaaagtaattagctagaactggtcctactagagtatggtgaaggcggcttctgcccaagaaatttaccttgttttgtggtctctctgttcatgtgggtctcactcatagataaaagtggtgtggccaagaatggaattgagaacactgcctccaataagacaaaactaaataagccaaatggtggaatttcaaggcctatacaccgtgtctgggtttcacgggtaagctattcatctgcatttcctgtatgcttgtagtcacttttcatttgcatgttcccagagagaaataaaatactgatataaacaaaggaattggagcaaggcaggttggttcttgggagatacaaatattaactcttattctgtctttctagattttttgcttcaaaatattctgttcaccgctaagattttaatgaaaagaaacatctataagaaatgtttctctatgtgtacctcttagaaatgtaataacttatttatgcaaatgtaaattattaaaataagtaattaatattgatttattattctaatgcctcttctgaagaactcttctagctgtgaactgaaagttatatcttgaaagtgtgcagcatttggaaccagatgaagccaagtttaaggctgggcatccttgcttactggttgtatttctttggctagttaagttctgtgagtctcaattattaaatctgtaagtgggtataataactcccctaattatactgtgaggtatatattattatgtgaggcaatgtatattaaagtattatacattggaaaccccacaaaggtaaggtgttattagtaataaccatcatttaatgctgttcacacatgacatgtatatatagtcactccacaaagcctgtgattatctaaattggtgattagaagagtaacagaagttctttccaaagacaacacatgaattcaaagattgaaaaaacattcttccatcacaaagagaagactttacactttctgttctattttgtgaagaggatatggaaattaaagtaagccttatgtattttttccaaaatatggatattaaatcagagaaacaaataaagaacaaaagccacaacaataacaacagcaacaagcaaactaagagtcttctggctcagttcaaggcaataacctgtattgtaggtaacaatagtgattactccgtattttctctttttattaatagaagaaactcaaagaagaagaagaaagtctggcttccttttactatttgtgactatacataaaatagaactggaaaagagaataataattatcctcttgtttgacttatgtcaacagctttttttattgtcataaagacaaaataagacaaaaagcattcccttataaaagtgtgaattgttactaaattatctagataatttcttctactctgttttactgttgctgaatgttttacttattgtccccaataatgttgtatggccatgttccaaagacttttaaacattttttgatttacgcacactttctattagccattttctaaaaagatttttttcccaaagcaagttgagtaatcatgctttctatttttaatttatacttaacactctattttcgttctcaccattcatgtgctctgtgtttacttaccttgcttcagacaggtctgtttccctttctcttttatggaaaacttcaccatctgttcccaatgctgtaatagcttaccatggtatttaggtttatagtgggtaggactgaggagtggcaaagagagttaagaaaaagaaaaaaaaactgaactgtgtcaattgaaattcaagttaattaatggaaaacttttgtgttaataaaacatttttattgcatactataacatgaagcatacatttcctaaaatgtatttattgttatatctactactaatattattcagccttttttttttttttgagacagaattttgctcttgtcacccaggctagggtgcaatggtgcaatctcggctcactgcaacctccacctccccggttcaagtgattctcctgtctcagcctccctagtagctgggattacaggcatgcactaccacggccagctagttttttgtacttttagtagagacagagtttcaccatgttggtcaggctggtcttgaactcctgacctcagctgatccacccacctcggcctccgaaagtgatgggaatacaggcataagccacagtgcccagcctattcagcccttttctatttggagaatggttggtctttgcacgttttacgttgtcatccacatataaatgaaatcagttgaaataagaaccattatgacacttttacattaaaaagaaagtaactattgaaacttttcagcaaagaagatatacgaatgatcagtaagcacataaaaaaaattgcccaatatcttagtcattagggaaatgcaagtttaagccacaatgaggttctatctcacatccacaaggatggtgataacaaaaaagtagacaataacagttgttgaggatgcagagaaacagaagcctcacgcactgctaagagaaatgtaaaatggtatagccattttggaaaacactttggcagtttcttaatcagtgaaacaaatttatcatataacccagaaatgaaattctacccaagaaatgaaaacatatgtccacaccaaaacatatacatgcatgttcatagcagcattattcataatagacaaaaagtggagccaactcaaatctccattaattagtgaagggagaaataaaatgtggtattttcatacaatgaaatactattcagcaataataagataaagcactgtttcgggctattacgtgggtgaaccttgaatgcattatgctaagtgaaataagccaggtacaaaatatcatgtaatagtatgattccacttgtgtgcaaagtcctgagaatacaaatctatagagacagaaaatagattagtggttacctggaattgaggtggaaacaggcattaactatgaaggggcctgagggatcttattgtgatgattgaaacattataaatctggattatagtgagacagatgtaccaccactaggtactttactaaaagccattgaattgcatgcttaaaatgggcttgagtactgcagtaggttttctgtgcaggtgtcttaataaggttttgtatggagggagaggctagccctcatctgggaaagagacttgctaggatttagtcgattttgtctctgtttgtgccacctgccccactatgaaagctttatgaccaataaaaacaggaaatatgcaattcctggagctcaggttttatattttcctgccccagaggacaacataaaatccatgttaaccctagattttatgcatttcaggtgttcaaaacaaggtacagtgtaatgcagggaacttgaaaagcagagcgtttgacctcagcatcctgaaatcaggtgtgagaagaagaaaacaagacaccttgtaattaagacagatccaagaccagattaataataaatatggcaggaaacattgggaagtgtcaccctagaggccgaaccatggattttaatatgtatcctttcaattagccattgactctgtggacatcctttcatacttaatggaagcagcctatgttaaaattcaaataaaatctcaaatttaaaatcatttctcattttcactctgcatttattatagcagcctctttgaagtcactgtccttcttcttctttttttttttttttccccagacagattcttgctctgttgtccagactggagtgcagtggcacgatctcagctcactgcaacctccgcctccccggttcaagcaattctcctgcctcagcctcctgagtagctgggattacaggcacccgccaccacacctggctaatttttgtattttcagtagagacggggtttcaccatgttggtcaggctagtctcaaactcctgacctcaagcgggtctcaaactcctgacctcaggcgatccgctcacctcggcctcccaaagtgctgggatttcaggcatgagccacggagcatggcctgaagtcactttctatccgataatttatcattcattttcttttaacatatattaattggccattgactctatggacattctgctcaatggagaagtccaaagggatatcaaatatccttgaacttttcaccaatttgcaggacagcggaggatacaagtcaaacatatacatagataaattactgcaatagagcaggggagcacatgctgacagccagaagagtagggagtggtagttcctaaatgcatattgattaactgttcctaggctggttgcatcaaaattgtttggaaaagaaataataatacaacttccctagtcttacactatccccttgctattcagtgtgaactgaggaccaacagcattggcattgcctggaaacttgttagaagtgttggattgccagacccgtcaaagacctagtgaatcagaatcgcatatttagtaattttcctgtatgattcataagcacattgaagttgaggaagcactctggactatagacagatgtgtcagtcatgagattctgggaatttttttttaatatatggttactaggttgtttcatttttttttaattcattttatttgtctattctactagagaggtaaaagttgcatatatttatcatgaccaacaagttttttgaaatacattgtggaatgactcaattgagctaattaacatatgcatcacttcacatgtcattttggggggtttgagaacacttaaaatgtactctaagcaattttcaagaatacaacgtattgttatttactataggcaccatgttgtacaatacatgtcttgaacttattcctcctaattgaaatgctgtagcctttgactagcacctctctatccatcttatcagcgcgagcctctggtaaccaccatttgggaatgtgtatttttacaagggtcccagagggttctatgttcaaattgtgcagagaaaccagtgaccacagaagatggcgaattgcagaggtccctagagaaggtggtcttgcattgactaagagggtaagtggagagtgggtagggagagccatcagaaagagcaaaggtgttgagcagtattacttgagacctgtttgaggaatcatgagcaaagctgcttagctggttccaagggtttgaaaaatagcctgagaggttaaaagcaggggccagtgaatcacccacattctgcatgcagactaaagtttgattgatagagacaggcagtagaaaatcattgaatacttggggaaagaattgtgtaaataataagtgatgtaaagtattgtttccaatttttcaacagggcttactatgaataagagaaagtaaagcctgctcctgaatttaaacctgggtttatgggtttcttcacgtccgttcatatctttgaaacagcgctttttcatcatgatcatttctatgcccgtgaaaagtactgcaacatctgcgtgcagttgtttttcctcaataataatgtccgacgatagacgtaaatagtccttttgactagagctgttttctggaatggctccaatactaagaagggaaaaatgcaaaagctaaagaattagatagctcttagattgtgttgttctctctgagaagataaaactgaaacccctattagaaaggcaggattacggagagattatgatatgtgaaaattacaataggccacaggaaagtgtggtggaagacttataagcatctactgcaaaggaagacattgttctttctgattaggaaggtcataacctgatctggaggtttcttcctttgatgctgagagaaggaatcctaagaataataagaagccaatgtattgcaataactattttatggattactctgaggtccaaaattcctagaaaagatgattgttttctttgaaaagcaagaatctgcttttgtgcttcccagagaagatcgtttagaaaaaggagttggttatttattgttcactttcatgattctaaagagaggtgacctcagtgattgaaacagaagacaaaaataattttgagctgtctcttggcttttcatttttcaagggcttcaaatatattatttggctattacaaaatttatgaagcctcctgacaaactcgaaccctttccccccatttattggaatcactctgccctgaaaatttggatcctgaatctatttctgctcctgtactcagatctttgagcacagccagagaaaattttacaaatgtgtggcttggtgcctttaaaaagtataggccctacttcaactgctcattcagtatcattgggcaattagggcaatgatttgcttgtcttcaatgagttcttctattctcatagaagctctggcaagctatttgtctcaagccctttgtagagaggcccaccctcatgcccaggaggatgaactctcgcatggcttcctcatactctccctagtcctgtttctgctctcctataaatatttaggtatacaaatacatcttttttctctctctcttaaagaaagaagtgtttctttttgggatgacagcaatccttccagttgtactcttgatcctacattgcataccctctgtttttctttaagaccttgccccaacaatgaccccctttttctccatatcttcagcctttccttctctactggctccttcctttcagttataaacatgaacaaacttctgcaattccaaacaaaccctcctttgaccttgcatctccttccagctactacctatcactcttctgccctccacagctttgaaaaaaatgaaaactgaggatgtttttattgcaaaggaaaacatgctcattatataaagttaagaaatagaatagtcatagaagagagagatacaggaatagagagaagaagttggaaggcacaaccatatattaataactagagatgatcattgttaccaacttttatatatttctaggatacctctatgcataaaggtactttggaatcataaaatggatctatactgttcacgttattttataatataaatatttcatttttaatattttgaagatagttcagttacattgcatttcaatctacaatgccattgctagtggctaaattgtattccatggtgtagctgaataatattttgaagtattaactaatgtgtttcctcctgtactccctccctgacaccatctcctacccttgcacctgctcatcactacctccttctcagtctctccatatataccagacttaatattcttaacctaaatgtgttactgaagaagcatgggtagcattttaaaaagacactttcataactcaaagtagaggaactagagataatagaaaggaaatgttgagtttatgagtatttcaggaatctggtgttgaaaattttatgctataactgtgagtagtgttcatggtcaccataactaggatctttttttttttttttttttttttttttttggtgtgagacagagtttcactttttttgcctaggctggtgtgcaatggcgtgatcacagctcaccacaacctccgcctcccgggttcaagcgattctcctgcctcagcctcctgagtagctgggattacaggcatgcgtcaccatacccggctaattttgtattttttttagtagagacggggttcctccgtgttggtcaggctggcctcaaactccctaccccaagtgatctgcctgcctcggcctcccaaagtgctggaattacaggcgtgagccaccgcgcccgcccataactaggatcttataagcaagggatgagagttggaaataagtaggcttgtgttatgcccctttcatactaaacctagggggtagggaagataatctctaaatgatatgatctgagaatagagagcaattgggcttggcattcccaaatttccaacaccgccataataagagttgagcagcaataaaagtgaggcagagagagtctggtgcagtcccaggacgtctgtggctgcagactgctctgggagaagggtcacactattctatgcttttgtaagggatgtgggtgtaagatgaacaaaaatgtattggccaaaatgaagggaacctgagccaagggcacatcacatgagaaatctgcagtggcagcattcaggaccagacaagcatgtggacatctcaataacgaagggaaaagagacaaccacagccaagagtaaggctgaataataaacccatggatcatatacccacagatgccaaccaatgaccagttgccttatccttctcctctctctctctcccatcaccctattttactgaagaattcagtaacttagaaatgactgcacgggtgaggaaggggaatttccagaatggattgctttcttattgtaaaagaaaaaaattgggttgaaaaaataaagcaacttctttgtatacctgagtagaagcttacaagaattatatcggcttcactaataagggtgtactttatttaaccaatctcctatttttgaaattgttttgcttccaatcagtcattataaaaagcaatgcacagtcaagcatctttattcattctctcaattgtcagacttcagttagttcttcaaccaggagcaacctgtttcttattctttcttttccagcaaaacaagccttatgaagcagccaataaacttcatcttgccaaacccaatggactcaccacaatctctatagagttgacattgattctttattggacatggaggcatattcccttcttctgaaattctcacctctcttgagtttctcaatatgattgtttcctttatttactctacttctctgaattgtatttcctggtttccttctccactttcatttttctccaaaacccacttgggttaacatccaccatggttcccttttcttctcagtatttatgttttttatgtgagatctcagtcaatatcccatgtttaactatctcgtaaatatggtcattcctaaatctttatttcctacctgaaattttcaccaattttcttattagtggtatcttatggatattaattcatctatccatctatccagacatctatttatttatttaacatttttttcataccgacagaatgcttgccactattctaggcacttgtcatacaacaataacaaacagacaataatatctgtactcagagattttatactctagtttggctcaacagacaataaacaaacagtagggggaaataatatttttcagtcaacaactctaaaaccagctcattatcttcctcttttacacctgtgatttctcccttaacagcaatagccgtaagtggtataattatctatcaatcagctttttcatgctagcatgatcagaatcaacctcaattcctctttccacttttataagtattcaaaggcagtattgtctagtggttaagagtctgagctatcccattccacagaccttggttcaaattttgtcactacaagttatgtgattttcatctagttaatctctttaagcctgttatggtgtcaaaaaaatcctacctgacaggattgtatgagtgtaaatgagataatatatgattattatccctgtctcatatttagtactcaatgaatggtagatattgttcttttattatcatcatttatccaattgaccattgtgtcttgcagattctattttctaaatctgcactgtccaaaatggcagtcactaacgtggtgattgagcatttgaaacgtggctagccaaaattgagataacactctaagtttaaactatacactggattttagtttaaactatacactggattttagtttaaactatacactggattttagtttaaactatacgctggattttagtttaaactatacgctggattttagtttaaagtatacactggattttagtttaaactatacactggattttagtttaaactatacgctggattttggtttaaactatacactggattttagttaaaagtatacactggatttttgaaaaattagcacctaaaaagaatgtacaatatctcacagaagatttttgtatcaattacatgttaagatgacaatattttatgtctattaggttaaataaaatgctttattaaaattaattgcatacactttgttttactttctcaatgtggttaatagcaaattaaaacttacatatgtggctttcgttagaattctattggccactgctattctaaatatttcatataattgctcttctgctcattacaataataagctttatcatctctcttctctcttattgccgtgacatcctaccagcctctgcccctgattctcctctgaacttttaatccatcctctccagtgttgcctgattgatacttctaaaatgttagaaaaaaaatgtaatcagctttccactacctggaggataaatccagtctccttatctcggcacatagagctctttgcgatcctgcatttcatatacctccaggctttctttgaagcctctcacagttcccacagaatctggctactcggagccattttgtgctttatgctttttcacatggtttctctctacctgaaatgacctctcttaccctgactacccaaagaattcttcttttgtcctcaagaaccaccttaagttacctgtgtaaacttttccccacctctcctcttagcttttggttatacagccaagttttcacttattgtcctcattttcctgttctgttacttgttatctctctctggactttgaatttcctaacaaataaggttgtaatttcttactttctggatttgccatacacgtatttgtagcacattaagtacagaaaaaacatttaaaggaaggatagaccgtatgcttatttaaaaaaaaaaacaagtaaataaaccataagttaaacattcagtattgttcatatccaatcacctaaacaaataaaatgtaatatctgttcccaaatatgatggctatattttgtattattacagaaatagttgaattcagagccaattttgatttcttgtttcctagttcagttaataggaagcaattgtgaataatacaggcacctcctgaaagaggcaattctttaatagaaattctagtttgacttctttactgtttggtacaatactattttctccaatttttaaaaagtaattaataattaattattgttattgaaagttttgctgttgtttctactatggagctactatgacaactacattagcaattctgttaaggtactggtgcatagtatttgaaagtttgcaagccatagagccaggcgtggtggccagtgcctataatcccagctaattgagaggctaaggagttgggaggattgcacgagcccaagaattcaagaccagcctgggcaacatagcaagatcctgtcttatattaaaaaagaaaaaaaaaggaagtttgcaagtctttttatcttcaaagtattgtctgcattgaattgtctcccgtctgacagaaacctggcctgggaattacccctttcccttcccattgggtgaacactgaaactagtatcaggtgctaatgatttctgaaccagacaaaaacaacttagagaagtgaacacagatccctgtcctgtcagctccttcctgctgatttattagctggaaggcattgtttgttttaaaaggtggagcaactagggacggtctaccgtcatctttgtaatttcttaagatcccaaaaacagacatagtggtacagtgacctaattttccaggcaatggttacccaataggtcagtcagctaatttcagaatttgatgcaccacgaaaaaggatggtcattggatcaagaagtcagctgggcaaaaaagtcgtccttaataaaataaatgacatcatattggcagtagctttgctggcctttggatatttaaatttcataagttatcacagatgaatgtttgtgcagtactggttgtgtagaggcaaaaagatatgatacacattgtcagaagtgttagtactaagaaaaaaattaccaaaaaagatatttgagcttaagtgagtttacagtcataatataaacccactaccttgtaaaattggctattgtgaaataccaatgtttttgtaccacacctattggcatcattatcacgaagtaatcattgtgttaatagatcagaataaataggtttctatttcatttaaggttacaagtttcacatttgatccttgccattaaactttttttaaaaaaataaaaaaatataactggctggctacaacagggatcagcaaaatttttctgtagaggtccagataataaataatttagtctttgcaagctatacaatctctgcagcaactagtcaactctcaccttgaatcatgaaagcaaccatagaccatatataaatgaaagaacagggctgtgtttgtataaaactttattcacaaaagcaggtaaaaatagataaatattcaatggtctggactttggcccacagaccatagtttgccaacctctctgctatagtataagtgtaatgtactcaactattttcttattgctggggatttagatgattcccaaaatttctctattctaataaaaaatttcaacaaacatctctatggttaagacttcgtctgcatttccaaaactatccttagaatagtttcctagaagtggaatttctaggtcaaaagctataaatatttttaagccttttaattcttttgccacttgggcatgtaaattggtgtgtcatttctggaaagcagtttggcaatgcctaagtaatccctccctaagatctcacttgttctaagtacaatcatttgtaaaggaaaacaagtaaacaaaaatgctgcatgaattttacggttttttaaaaaaagatatctcaatgtattaggtttgcgtgcacatgacaggttacaaaaattcaacattttttacatttattttcctttcgtatttctattttaatatttttatttctatcttggcccatttgtctgttttttctctcatcattttatcttttcctctccaattttatttccaccgtacatattttagatggtaaaaatttaagagcacaatttctagaatcagacggtccaggttcacaccgtaattcttccactttctggctgtgtgacctttcgcaagttactaaaactccctgtgcctcaacttccacattgctaaaatggagtcactaagagtatctacatcacgttcttgctttgagaacccaatgagaatagcatataaagaaatcactttacacattacctagcacacagaaaatgttcaataaatactacctatgagaatggtagtgaaggtacatttccgtcatcgcttaaatggtcactacctatctggtgatcaaatacacttttacctctattttatttgaactttattatggtttaatttgaaaaatttctttggatgttattttggtgtatagtatagagacagtgtctaaactggtttattttctaaatagctagtcaattactggatggacatggtagctcatgcctgtaatcctagcactttgggaagccaaggcagttggattgcctgagctcaagtgttcaagaccggcttgggcaacatggcgaaactctgtctctataaaaatacaaaaaattagccgggcatggtcgcatgtgcttgtaatcccagcttctccagaggctgaggcgctagaattgcttgaacaatctgggaggtggaggttgcagtgagtcaagatcacaccactgcactctggcctgggcaacaaagggagactcttgtctcaaaaaaaaaaccaataataataattaatagctaggcaactactgcaataattgttattgaatatacattcctttctcattagtgggcactgtgatctttatcaaatattttcctattccactttttagaatttgcttcagggaaacctagtcttagaggtatctgccggtataatctggcttcttcatcattgacttatttgttatgactttataatactttagcacccaataattcaactcacttgcatgactctaattccccatgtttttcttagacatcctaatagatttattcttttatttgaattttgcagtcatgttgtcaatttcccatacttaaatttggttacttaattttggattactgttacttaaacttggatcagaagtgaatgacacttacgaaataacctgagagttgacatgtgtaataatgagcattcttcacatcccctgggacataatgtgcatctgcatttttctgattcttttttctatttttcaataaatttttgtggttttctacaccactaaaagaactagtaatacatagaggtgctcaatgctaatgctgggtggataatgcagcattgctggagggattaaaggcaaattacctcttagcctttgaaggttcttctaagtagagggatctgttgcttaattcacattttaatgcatttaatagctctaaaaatattttatctggacctcctatttgccagacattctaataggttctatgaaggatttagacaaagactcagccataggtcctatcatcgagattcttccagtctgtgaggaggcacaaacctgcataaatgtaattacattataatattgcaggtgtaaaataaaagtatgttaagagcaaagagttggcatatgattaacagctatgatatgcaggcaagacttccagatgagttgctgatgaaacttgtgtgaggcacaaaaaagatggataagagtttcacaggagtgtaaaatggcaatgtgcattatgtgtttgttaaggggtatcaagatgtggaagacatcatctgtgattcttcttgagtcttggactctgtaaaatccacattgtcaagtcataagtcaacttgaagctcagaggctgcctgtgttgggaaaaagggtgtgaatctccagggcaagacaaagattaagtaatggatgctttgatgttgtttccttgaatgcgtctatctcatgtgtgtttctccccaaatatttggtgataatgtggtttggctgaaggagagaatgtttgttgaacattatgtcagcataatatcagctttagaatttcacagatatctaagtgtcctaagagaccaactggactggatatcagaccaagattctgataaaaggggataacagagattaaccggagcagaaaaagtacttttctgagccagagataacaagagaaacttaaagaaagtgctgaagcaagaaactttaagcctgtgagtaggtaagtaaaaacttaaattttttgcaataataccaaagaagatttccttttctatcgtattaaattagtgctatcggctttggtctagatgcttctgtctgaagtatagtggctgtagtattgtctttggaataaatattaataacgtttgtttctgagtattcattttcgtaattaattgcttcaggttgagctatgtcgcaattaaagatcattttgaaccaacttctacactcaaaacatgaggaaactgagctcatagagaagaaatgacacttgaaagtctctctgacaacctatgcatttaacattcatctataacactaacattttacacttttgctgttttcctttgagtacagaagccatcatgaatgattcgttttttgtttttgtttttttggatggtctttagtttttagaaccattttaggtttgtagcaaaattaagtgggaggtacacagatttcctgtatatctgctgccctcaaacatacatagcatctcgtgttatcaaacatccctaccagaggggtacatctgctataactgatgaacctacactgacatatcactatcagtcaaagtccatactttacattaggattcacacttggtgttatacattctatgggtttggacaaatttataatgacatctatccattattacagtatcatgtagagttgtttcactgccttaaaactaccctgtgctttgcctattcatacttcccttcccctaactcctggaaaacactgatctttcttctgttttccaaaatcttatatagctggagtcacgcagtacgtagaattttcagattagtttcttttacttactaatatgcatttaagtttcctccaccttttagtatgatttgaaagcccatttctttctagtgcttaataatattttattgtctagatgtaccacagatatttttatccattcacctactgaaggacatcttggttgctttgaatttttagaaattatcaataaagctactataaacatttgagtacagattcttgtgtgacgtaagttttcatcccctttgggtaaataccaaggggctcaattgcaggattatatggtcagagtatgtttagttttataagaaaccaccgatctgtcttccaaagtggctgtaccattttgtattggcaccagcaataaatcagagatcctgttgctccacagtttccccagcatttaatgtcagtattctggattttgatcattctaataagtatatagtggtatcaaattattgcttaaatttgcatttctctgatgacatatgatatggagtattttttcatatgcttatttgccatctgtatatcttctttggtaaggaggctgttaagtctttggcttattttttcaattggattgtttgttttcttattgttgagatttaagagttctttgtatataattgaataatagttctttatcagataggtctttggcaaaaattttctcccagtatatgagttaactagttaactagtttctcctgatgagatatcttattaagaagacaagaatgctctctagtgtatgtcaaaatgcctcctttccccttcctctgccagaagcataaggggatttttaatttttaaaatttttttgccaatatttactgtgagaacttggtgcaactcctggaggcaaaattcaaaagtgtgtctctcctcccctcaaccacctactccaggactggatctccctggagtttttaatccttggacttgtttacactgacctccagaaattcatcaattacagctcaggttttcctactcaaaactgattcccttggaggtttctgttctaataagctgtgattttttttttaattcacctcttgacttacccagttttggaggcagtggtttgccctgtgccctcgcttctctgatcgatctaagagttgttgattcttcagtttcttcatccttttgtaatcaagtgttcaccttgcctgctgcctagacagggccagcttatccagacaggggaattgcaatggagagagagtaattcaagcagagtcagctgtgtgggagatcggagttttattattactcaaatcagtctcccagatcagagtttttaaggatagtttgtcgggtatgggcttggaaagtgaggagtgctaattggttgggttgaaggtaaaatcatagggggtcgaagtgagttcttgctggcttacattcattcctgggtgggatcgcagaactggctgagctgtattatcagtctgagtggcgtcatctgagtgatgtcatgtgctatatcagaacgcagggtctgtaaatatcttaaacactgatcttaggttttaccatagtgatgttattcccaggagcgattttgggaaggttcagactcttgcagtcagaggctgcatggcccctaaaccgtaatttctaatcttgtagctaatttattagtcctacaaaggcagactggtccccaggcaagaaagggtttttcaggaaaggactgttatcaattttatttcagagtttaaactataaattccttcccaaggctagtttggcctacaccccggaatgaacaaacacagtttcaaggttagaaggaagaaggggtcagttaggtctgtttcaccgacataatttcctcacttatgattttttgcaaaggcagtttcactttgacttgtggcaacttccaagcttctaacacgtttcatagggctgattttaggtttttaaactacacattttattatgttttaaaatgagaggtccatctaatgacaggattattatatatagtatatatcttattatatctttaaatgattagtctttggagtttatttcctgattctaatatttttcatgttattatctgatagagaaactaattaatcatattattagagctaagtctctgtctgcaagtatgaagactagatcatttaaaacagttaattcttaaagagctagagacccaggagggaaaatgtatttgaaaaataagagtttctatgtcatttgttaaatcaacagaaacatgacctgaagttccacctaaaaaccttaaagtcccaattattcttaatttacaagctaaatttaattgaatacttgaattaaaagctcaaattttacttcatcaaaagactcttcccataatttttggtaagtttctcatcagtatcaacccttagagtttaccatgaatgctgaagactcactgtgttacacttatccgttctgttacagatgaactttacgggagagattttaaaaagatgaatgtattagcatttaagcagtcagagaataatacaccaacccaagtaagagaggtctatgaagctgttttgtttgtttttgttggtggtggtggtggtggtggtaaatttaccattactagccaccaaatgatggagtctgtgattgttccagtgcctctcagataataatatcttttatcttaatatattttcatcttaatattgcagaagatctggtgatgttgtcgtgctggtaagaaacagagctcaggtagcccacctctcttaaacctctaaaagtgtttcttacttttaaaaatatttctggagttaaaagtcctgagatgtatagctctctctcagtctgagagactcacttacctgagcaaatacttgaaatttttccttacatgcagagcctcggtaggaagataacgtatcagtcaggtgttgcctttactctgccagaggcttcagctgttaggaaatttaccattctaacttttcactgttggaatcgctgggtcatgcagagaagcaaaatcctttagatttctttcgtcctctgttggcaatactgtagccctgacttaggattcagctgttacattttcttttgcaactggagaaaattgaaaatgtaacttcataatatccctccactcaatgttgtcaaagacacttaaaaactcccagttactacttaagccttaaaggtgcaaaggcaatttcgttttggggctttgctcctctttttcagctgactctctaaaagcctgtttcttccccagaagcaggtgtcttgttgctgagtatcacacttatagtgggggtggatctttgaaactggatctgtggacttttctctcttaccatgagccctctgatctctgcagcatttttccttccttggaattcttgcacaaacaggagtgattgattttcaaaattcagactattcagtttgatcattttaatcctaccacaaaatcatggctgcaagaggaaactttatttaagatatatcagccaagattctaaagaaaagttggtgttcatttaattcttttaaagtcttggaaggtatctaatcgccacaaccaaccattgattgagacgtcattttatttttctgagtcccaagagcaacataataggccttcaaagcatattaatcttgaatagaatcaataaagaataaatgtcatttttaacagactggaaaaatgaggattctctggcagtgatgtaaccatgccgaagtatgaagttgtgtttttgtgtgatgggagtaattgaagagctgagggcaggctgcaaaatgcagtcaaaggaaagcaggcttgccttcagcaaatgagaagcttatagctttgtcttcacagcatagtaaaaagattaaacagaatcagactgaggaaggaatttatatctcacgatgcctgcccactttctgagaaaggatacagtcatctcttggtatctatggaagattggttccagggcccttggtgactttaaaatttcaggatccaagtcacccataaaatggcatattacttacatatagcctacacacatcctcccacgttttttaaaaatcatctctggattacttacaatggaaatgccatataaatagatgttatactgtgttgtttttcatttttattattttgttgtattttcatttgttttgtattttattttgttttaatatttttgctctgaggttggttgaatctatgcatgcacaacccatggatacagagggccagctgtacttgcaaaataacatatgctcaattttgtcttaagaacaaagtattagttcacaggaaggacaaccaaaggtcctttattcatttgtttttgtatttatttaagaagtacatattgagcacctgtttcatctcagttaccacgaagagttagagagacaggagggtgggtggtagataccaagatgataaagacaggaccttgaggagttcatagtatgatgggggaagagagatatgcaaataaatcatcagaatttgtagttacaaatgggatacttgagcctgaacaatgtgctctggaagcacattttgcctgggaagaagcaggagtaagttcatgaaagatgcatgggtctctagtaagtgactggtacagtatatttaatgattccaggctttagacttctacaattaggcaaacaaactaatctatatgtaagagatacacagtaccttgtccaaatttttgtccaaatattttcatactacagatgtgttctagcccctctgactaacgtttcattttaactgagactggagcagtgtggagcagctgagccttggaaacgtaaaaccagggaacagtaggtggtgtgagactacagacctcgaatcttcatgagttctggtctcaggtagattaaattaattcagtgatgtagaagtaataaaataaaataaaataaagtctgacttctggaaatgactcaacagtttaacaacaaactttctttcaaatctgtaagtatctattcttattataaacgattcttgtaaggtttaaggtgtggacattcccacctcactggccgctgttgtgtgtgtgtgttttgcaattctatctagacctcagccagccttttgggaaatttagaagggatcacagggccgggagaagataaagacaagaaagaaaaagagaaagaggacagtttttctaggatagagcagatttcgttctgttggtcctccaggctttttctccctcctgatgatttgtgaaaacccaccttcctgaaattccatggaccaaagtactgcaagaaagtagacgacaaaatcgaaaagaatttggagtgaaactggattacactggattatgcctactagatgtgacaaaattctaactctaactccaattctaaaatctaattctttggcttttaacattccacactgatgatcctgaataatagaaaatagattatgtagacagaatttgaaaaaaaaaattctaagtggacttatgtgtgttaatgggttaatacatgagaatcctttgtgttttcaaagcaaacttgcatgggtttcaaaatattgtaactagtagctaaagttaaaaatattatcatatcttttaactcaattaaaagctgggcatggtggctcatcctcgtaatcccagcactttgggaggcaaaggtgtgtggatcgcctgaggtcaggagttcgagaccagcccgaccaacatggtgaaactccgtctttactaaaacatacaaaattagccagacctagtggcacatgcctgtaatcccagctactcgggaggctgaggcaggagaatcgcttgaaccccggaggcagaggttgcagtgagctgacattgcaccaatgcattccagcctgggcaacaagagcaaaactgtcttgaaaaaaaattgataaattaaaaatttttttaaataaataaaaatagtagaatattgaggttgctaagcctttaaggtttttcaaaatggtgacagttatttttgtttcatgcttaggatagatgccccattaccatgaaatcaggttttctatggcagtttgcctacattccctcatgtttttttaaataaaatcagttcatcaaagggataattaaatgtggtttatttggaaatgaactcataaatcagaaacatatttgcctggaacataaatcctgatttttttcgcccatgaaatttagttattttacccatgagttcaataacataggcgggcgcagtggctcacgcctgtaatcccagcactttgggaggctgaggcaggcggatcacgaggtcaggagatcgagaccatcctggctaacacggtgaaatcccgtctctactaaaaatacaaaaaattagctgggcgtggtggcgggtgccgtaagtcccagctactcgggaggctgaggcaggagaatggcgtgaaccaggggaggcggggcttgcagtgagccaagatcctgccgctgcactccagcctgggcgacagagtgagactccatctcaaaaaaaaaaaaaaataataaataaataaataaataaataaataaataaaaattaaaaaaacattaagtaacatagcttgggtaattgaatgctaaagtaaacagtctcgtgagatttaaaatttataattgacattgtttgactggaagtaaccctctggggaagtcactatacagaattgttaacattaaaatatagttaatgaacaaatgaagctgggcaacttttcctgcagattttgaagggagagtgaacatccctttccaaccttataattctttgtctttactgagatcttctcgagttgttaaatttcaacctgttctttatagtgtcaaatgaaagtgccattagggtaatcccatagaactagttcgtgactttcttttttttacagtgatactgtggtttggatgttcagaacatccaggcacttccagatcagtatcagcttcaacggctcaaagttgttccaggaaatgaatgaagtgccctgtgtgacctccagtaagcttgcttatttcaagagagcttggtgttttctcgtgacaaccttgcagattacttcggtgacaatgtaagccttgttccaacacccagaggaaaagaaaggtttttaatgaaatggtgagagttgaaggaagaagaatgactaacacaacaccttggcccactcatggtgaagatgagacttaaaggaagtttggctcctacttcctttcgaaataattgcaacacctaggaaaattaacattcagtcaatagctgggctctgccaatgtgcattttcttccttgcagaacaccgaaaaaaaaattgaattccagagtacatttcttacttagattaaggacactgacaaggtcatttctagtctgccccaggtaccatatgcaaaaggatgggagtgggagggagaacactgatgaagataacctggcacccttactacctgtgtgactttgaggttaactttttcaggctaatatttgtatttggaaaatgggagtgatgattttgtatttactcgcaaagaaggttagaaggattaaacaagataacacatgtaaggcacgtagcactctgcctggcactgagcaaatgctacataggagatagctgctattaatagcgcaacacgatagtttccttgtggaattttctcccactgactctctttcaactaagtggcagtactgtttttgtatctattttaggaaaaaataaagacctgcagaacaaacctagtttctatttccttgtcatgaaataagctttcccttaagaaatacccagcacaaagacaacccaaatatattatgagaaggttcattacttctgaatggtcatttaactaaagtgacaaaagaacgatgacaggattattattattttccttgttatactaggcttgatggtgagttcatgttacacttagcattattaggaagaattagtgtaattgttagaattatcagtggggaagagtactctgcttcctagagagtggataccccatcttaccaataaaggcaataaagaagatgaaggtgacactttttagcaattctgtggtttagtgactctgtcctattcatctttgagtcccactgagactggtttgaaatacagagatactaataccttgtacagacagagcaagtactgctttttggaagttggatggaagaccatatatatatacacacacatatatatacacacatatatatatatacacacacacacacatataacccctgtctaacacatagatgtggtttgaggaatttccatctgtttttggcactgcctctttggtgcatgtggcactcgttcaaacagctctcaggtttcactgagcttaggatttgccatctggttgtttggaacaacttttctttgtccactgataaacccaacaaaagggttacgaacaaaaatgagcatgatccaggtgccaggaaagatgcatttctctgacagtttcctcctctatttttttttatagcaacactcattttccatagctctgaataccaccatcaccatccaattccaccctgggaggaaataagggagcaggctccatatatagattacatactctatgtaaaattgcttgtactcaaacccaaaacactctgaactcacttcatcagtattggttggagagaaaaattctgtgcctgaacaaggtgcagatttgtagcaccattatcagaggcagggctgattagcatatcacgggccagcaatattactgaaatcagaaataaaatttaaagtcacgtttaaggtaaaataatttgcttatttcattcaaatccaaaaactaggaatcatatgatagataattgggttgtatgttttaaaaaaggcaaaggaaataggggaagtgtctaaatttctaacttaatcctatagacaaattgcaaataaattatagaaacagaacagggacctatccaaaaatcatagaatttctaggctgaaaagaatcttaggtttgacttaatcatcttaattttacacatgaaaaattgagactaagggaagttaaatggcatttcaagctcacagatgagtaagtggcaaagatgagaccacaggctagatctctccattttaagatgggtgttttcaaagtatgtaatcaatttgtgacttcttgtcaatattatccagttcaattttgtttaatttaataaggacctactgttttctcatggcaaccatcttatttagataccttctaaaacacagaagtgtcaactggttgatgagatttaataatattatccagattaccttttgtttcataaaagatccccacaagagttatatgttcatattttacaaaacaaattgtataccattattttcatattttaatttcatcctagtacaactgactggatgatgggaaggttcagtccatgtatcaggtagaacgaatcatcatcacatataattatgtgccccagaggcaaaatgcctggttccctctacacattgtcttctccacagagacaggcaaggaaaatggttatcagtgaagctgttttgtcaatttctgattaatttgggggaaatggtagcagtttgtttcctgttatgtcatgatgcatggatttggtgctttcataaacacaagcatgttcagatgattcaacagtttggttttgacaaattcattaatacattgattttcatatcaaagaaaatattgatctatttaaaggactggctatgtatcgggcactcaatctgtgttccccaaccacgctgaaattttgttttcccccaacaggcccacatgaaagtacagaaagccaatgataggctggctatgggaccgacgtaattggaagtgaggcactgacccaaaatttggtgacaaaaatatactagaaatttattcctttctttttcttttcttttttttttttttctacagagtctcactctgccacccaggttgaagtgctgtgatgcgatcatagctcactgtagcctcaatctcccaggctcaagtgatcctccagcatcagccttttgagtagctgggactgcaggtatgtgctaccaagcctagctcattttaaaaatttttagtaggcctggcacggtggctcaagtctgtaatcccagcactttgagagtccgaggcggggagaccacaaggtcaggagatcaagaccatcctggctaacatggtgaaaccctgtctccactaaaaatacaaaaaattagccgggcgtggtggcaggcacctgtagtcccagctacttgggaggctgaggcaggagaatggcgtgaaccagtgaggcggagcttgcaatgaaccaagattgtgccactgcactccagcctgggcaacagagtgacactctgtctcaaaaaaaaaaaaaaaaaaaaaaagaatgaaataaaggagtgaaaaaaaaatttttagtagataggaggctgagctgggaggatcacctgagcctaggaggctgaggctgcagtgagctgtgagctatgatcatgcctctgcacttcagcctgaccaacagagatcccgtctcaaaaaaaaaaaagaaaaaaaaagtaggagagatgaggacttgctatgttgcctatgctggtcctgaactcctgagctatatagcagtcctcccaccttggtctctcaaagtgctgggattacaggcgtgagccaccatgcccagctgtaggtggagcatcagcaggttttaggtagtagcaataagcaaatcatttgaggtcacagtatccaaccaagaactcagtagagatagagcttgcggattagatgccttacttattacctgaagctgagcatgaggagtgggaaaattagtgattagcaacaacacgcgtgtctaattaaacaaataaaaagaaactattaaagtagaaataagaactactgaatataaataccttcaacagttgtatgctatttctttttttccaccttttttactcaaacaacttgtactcatatttaggagtttcagttggcttttctcaccactaggctcttcttatttcttgcaccttctgtcccaaggatctatacacatgtcacctgtcacaagcttagaactgatgagacatgagtactttgggctgattacactgttttttggtctcctccaattactgatatctgagctgggccaaatgagtgggattcagaccaggctgccagatcgaatacaccatacaattcaaagtttctgcctctggaatccctatagctcatttatctgtagctcacttgcttgcttctttctttctttctttctttctttctttctttctttctttttctttctttctttctttcttttttcctttctttcttttctttctttttcttgtttctttctttgtttctttctttttttttttttttttaaataaatcaccttaagctatgttagaggccggccatgatgcagtactctaatagcttggttatgttggtaattacaatcatatgagacaaagtgtctcatgtaccatatgacaacaggaacccaataagggcattggtaatttgagttcccattttaaaaagaatctgatttaaaaatatatatatatatataaatatatatatataaatatatatatatatattccccttgtctgcctaaaactttagaaagctcatgagcaatcttgggatatttgcaatagttactcaacaatcaaatttcatgttttaataatttctagtattcaagaaaaaaagaaaagtgactctctagccatctatggtttatgaaactgaattgtgtcattctgacaaagcaaaatatattgctttcataagggaatggaaacatttgttttcaaagaatataggtaagacatcaatgaaatcttgtctccctgtatgaaatatataccaatttccttttaattctagaaagcaaatatcgcatttacatactatacttatttggcaggacaagcaaagttccccaggaaagaccaggggtggctgatagatagatatttactggttcatatttttttaaaaaaattcctaaatgtcgtgaagttttaaacgttttttcttttcttttctttttctttctttcttttttttttttttttttttgttctttgagatggaatgttgctctttctccccacgctggagtgcaatggagagatctgggctcactgcaacctcctcctcccgggttcaagcgattctcctgcctcagtctcctgcctcagagtagctgggattacaggcatgtgccaccatgcccagataattttgcatttttaatagagacagggtttctccatgttggtcagactggtcttgaactccgacctcaggtgatcctgccgcctcggcctcccaaattgctgggattacaggcgtgagccaccgcacccagccttattttctttttttaaaaatggcaaagtaaccttgtttgggaagtttattaacattgagaatttgtttcctctgtttttgtgtgtgtctgtgtgtgtgagagagagatcctagccctgactttttcccctgttcctcatttatcatcctgtccaggtcagttcatgggttctgtccctggatggtacagcttcccgttgctttctgtctgtaggccttgggataaaacatcaagagactgaatctattagtgggtctttcaaaactctgcttttattttcaaaagtcgatgttcgtttgattctacagaggtgttggaattttctccttgttttaatcttggctctctgtttctgctttgacataaaagagatcttaagtggctataaaactaatgcatattattaacacaaaacattttcagggacacaggaagttttgaaaatgaactttggtactggttatcttagccaattcctcaggaatcaatttaatcatagaagggatgtttacaagaagatctataatgtacatacgtgtgtgcatgttttataagttgttttctttggttagcattaaaaacatgacgaaaaagaggccaagtatggtgtgggtgttcctgttattttatatatacattggatccttgtaaaatacttaggaaaagtgagattcctagacagagaagattctaaatctgcacattgctgaaaaaccagatgcgatatattgaaaagcatttactttgggtgttttatgtaagtgagctagtgccacagaattgaggaaaaaaagcctaaaacacaagaaccaccaccaccacaacaaaatctaacttgagatgaacaaaaaggaaagaatgtttcaagggtaagataaatttcctggagtgcaacagtggtgagctgatatgatatgactttttttaatgcaaattacttccaattcacttgacatatgagggaacaatttgaacatgtgtctgcttgagcatagcataaaatttgagccaactttctatgtaccaatgtgaaattttgcctctgagaaacactaggtaaatgcaataaaatctgcacccaggtcaattgatctatgtaagaatacacgcagaaaatcaatcatctcccagccacctcagttcacagtgtggtataagctcacccatcctggtgttacaaatttccatcagatttcagacaacttcaggacaactaaaaaacagcaaacatttcttccagtgcccacttccatgagtaaacttcaggttttgagtaaacttcaggtttttcaaggcaaaatgtcatatttattacagtatctatgcatttcttaacaatgaccatgtgcaaaactatgctacccttttccttgggttcttattttttattatttattatcatatttattactttattttgaatttttaaaaggaaaagtctcactgtgttccctaagctggagtgcagtgataagatcttagctcactgcagcctcaagctcctgggctcaagggctcctcccacttcaacctctcaagcagctgggaccacaggcaccaccatgcccagctaaattttttatgttttgtagagatggggactcactatgttgcccaggctggtctcaaactcctggcctcaagtgatcctcccacctcagcctctcaaagtgctgggattacaggcgtgagccaccatgcttagccaaggtccttatctttttaaaaaatgcacttccggtaacatttttgagtggtatgctcctatgctcccaattctattttgttgaaagtcctgtgactttttttttttttttttttttgagacagagtctctctgtcgcccaggctggagtgcagtggcactatctcggctcactgcaggctccgcccccgggattcacaccattatcctgcctcagcctcccaagtagctgggactacaggcgcccgccacctcgcccagctgattttttgtatttttagtagagacggggtttcaccgtgttagccaggatggtctcgatctcctgacctcgtgatccgcccgcctcagcctctcaaagtgctggaattacaggcgtgagccaccatgcttagccaaggtccttatctgtttaaaaaatgtacttctggtgacatttttgagtgttatgctcccaattctgtttggttgaaagtcctgtgatttttgttgtagatcatgcatcgtatggtgagtttcagaaccactatgtcacgttatagtggaactaatggcatagctcactgtgagcagtgtgatggcagaaaagaacacatgggtgacaagcacacgaggcaccaaacactttaatgtgccaggactctgagccctgcaggtgttattttctatgaaataagatctcttctctactacagtagcaagaaaatctcaacatgctactttgtctttattttcaaatgtgtcctctggtcattgtattcctaatgcctccacggttttgtttacctaggatgaacctaaccagttggcagtgcctcgtactctgtgatggattttccgaagaccaaatgtaccattttcttgtcttttcaaagagagccacacaggaaggaaaacaagaaattcaacttttaagctgggctattcatggcctttgctaaatcctggcagaatttcacagttcttcattacaattcatctcactgatttcctaatgcaatgaactggccttttcattaaggccatagggaatgaagctgagttacccaatcattaagtgttgttatctgatgagtgaaaaatggattacttttcgatgtgcatttggggagccgtgtgtgtgtgtgtgtgtgtttccactagattccattttgcgaaaattggttcaagtggaaggacagggttaatctttcatgttctgttctgctagaacactatatggctttctgctctgtgagcaggcaaagaaaaattggtgggctcaggaatcagaaatgcagggccaacagtcctgtttctcactttcgataaaggccaacattttacctgctcaagaacactctattcctttaaccaacgggagtgttatttaattagttccttcgtttttcagctaaagcagacacatgcgcacatcacacacacatgcatgcgctgtggtgttttttcttctatcacccctccctccacagagatatcaatttgcataagaggagaaaataaattcatttaaaccccattctaaattcagtattagaaatgtaatgatctctaacactgacctttttaaaatactttgtggataaaccattgattttatttgttctaaatttactttaaaagacctgttttgtaaatcactaaaacacatgtattttatttacctgtttgggataatattaaacataatctttgagggtactattttgtctattatagttttattctataacatagattgaaccgttttcatatccaattcattttcattaaatttttaaatggtagtggtttaggcttgggattagataatacatagcccatttgatataacattaaagcatctttattagatgtaaataatttatcacccaggtgtttagtttacagagtactaaatatttacatatttcataacatgtaaatcaaatgctaaataaaaaattttaatttgccatcctgttattttagcattatataaacacatttgcaaagattttaatgttttaatgtgaattaaaggtacatgtacctaacctcttatctttctaccaatcctagtatgcatatatctgaaatagtagtgtgtgaggtgtgtgtgtgtatgtgtgtgttcatgtgtgtgacagagtgtattatgttttttgaaatgcagagattaggataaaggaaaccataaatgcaaaataaattaattctctagaataattgtatgcagtggtctacacaattttgttaaatttggctcattcatttttttgtctcacgtataaatcaaagtaaatagttaaaacatgaagtatgttctttcctaagttggattgtggtttacaagatattgaaacaactgagcattataaatatagccagtcaatttgttgggggctaagaaaaaaaaatgaaagaaaaaaagaaaattgaagttgtattttatctccatgcagcactatacaaattcaaaaccaaattcaggatttctgagcttgtaaaatctgaacagtaactctcttcattttagcctacctagatctatattttaatcaatgtaatattagcaacctgtatagatgacaatgagatgaagatgtacaaaaatgtacccaactgttccattttgaagagtaataattaatgagaacacttatatttgggcaatagcaaatgaaattataagactatgtaagcgtgactatgtttttttggtgtcaaatagactatgtctacatgaatccaattcaaccacctatgctaaatattcaaatggccatattaatctttttaaaaaagaaacaatgtatcagtctttttgcctttgtataaatataacatcctacatagattcattcattccttaaatatatatttattgatcacatgttatgggctgagacctgtgccaaactttgagtattcggtgtggaagaaaaataagacaaaatctatgtccttatttatgtagtttcgtttcgttgtaatatgcagaaaagaaagaaaacaactgtacatctagaagagataatagagggcatccaaccattttattttgcacactagaaaactaagatccaaagaaatagtgtcttgacaagggtcacacatctggttagttctgttcgcagtagaatcccattttctgatttttctctagtgatgttgcccctatacttggctgcttctacctaattgatgccattgaagaatttccttctcaagaagtgaaaaatcttcagaataagtacccctgcatactcagataaagaaaactcagaactctctgtgactccctgtttctcctcttttgcttacttttgtcagctattaaataacataagggcgttttattccatttccttctgcttagctctccctctaccagctatttccagcactcattaacttactccttctaacttactccttacttctccacccctcccctctcacctactgtcttccaggcaaatatgtgccatatatgggccagatacacatttcagaaaaagtctacttcagttttagagagatgtcattagtatatgtaacttaccatgttacaatagacatcatcttagatacattatttaatttgaaatgacatcaagttacataaataccttttggtcactttttgtgcaagccattagctccagaaagctaatttcttcatttaaaaaaatcctcattaaaattttgaatacattgtttttttgaaaatgctgaactgaattgctccttggagaaacaaatttgagttaattattttttctttatcttctgcaccttatatgcattttggagggcttggagtagatagtaaaatacagagtccttaaattaaacagaagacaaaaaggaaggaatgagagggagaaaaaaaaagggagggagagagaagggaaaggaatagagaaaggcagccaggcaggccaaaagagactttttgtaggagtcaaagttgtagctcttgttacaacatgagacattctgatttgtggtttgatggactagctgtgtgaactttatctttacaaaaggaaaaaagcccgtttgcataagcaaaggcatcacatttcaattatatgccctttggagattcaaaagttctcaatttctccctcctccaaatacaaacataaactcagtcaggtttctcatcagcgcagaagttaaagaacacgtgactctggtagacaaaacaagaagatatacagactcattggaaatgtctagattttgaaaaatacctgatgtggggaaaaattaaaagagacaggaatggaaaattcctctgctggcttcctgttctccttcctgctaaggtgggattagttaccagctgtcaaaagaaatatcacttttaattcttattttagggggaaggaaagcatcagaaaaagctatcttggaagggagtgaggcaataaggacattcatttttgcaattcattcctgaggtttgaaagagcacaagttgggaagaaaaggattatgtttcctatgaaaagtgaagaactgaggacatgataaaggcagattaatctccttcaaatatctcccaataacataatcaatgtggtaatgaagccagttaggagtttggggcttgaagtatccaagtaattatttgaaatctctccttggatagaaaaagaattaataagagcaaactagtctttaaaatgagggcatgttttgaaatgaaatcaattatctttgatgcaattactcttcccctggaaagcatttttttttttgagaaggataacttttcaatttacaagcacttcttgcagaagaatagaatttacctaatgcttgaggatgcccttcaaatgttgggtcacatctggtggatacatgatagtttataaagctctctcaaggtatggtttcaagtaatccccataacatagcgtagatcatatcagtcaacgcggctgtgattggagtactaaaaagccagtacacatgctctaaaagatctgcttcactcaaatctcctgcaatgttgggaattccatggttagaaatgcattcctttgcattcagacaagagctccttgactaaggttaaaaagcaagattcaaaattgtaaatctgaccgaatctcaactttatcttaagacagtagagaaaatgactggaaataatttgaccaaagaaaattgagacttgtgattattttttattgccctctttgcactcttattcatagtatctacaataaacctatataactttaacatccaggaaagatttttttaaggtgttctttccattttccccactctgggagagataatgtagtttttcatctattagcatgattcaatgtatcagattcattcaaatgagacagccaatttcatccattttatttaaataattgttgaagtgcagtgcatcatcttaggaaaatgctgagtgggaattttcatttcaatcttaagaaaattgctccttgaggaagaaaattcaagttggctcttttccccccttttccttctgcctctgattccatatagtctggagggtttcaaacacaataaaacacactgagctcttcaagtgattgagacacttcagaggaacattttgagaactgggattatgaagcgagaggacaactcaggcacaacctagtaatgctgcagtatctgggcagcaagagggtcttgcgactcaggagagatggacgatggacagtgatagggaagctcattaagaaagtaaactgaagaaaaaggtaaagaaacctttaaaagacaaacagttttattttcctaatatgcttgtttgcttaattcagaaaagcattcatccctcagtattagtattagtatcagtactgaattctagctttctgttagtcacttggttggactcaaagatgaatgagggagtcaagcacaatgacacatgcctatagtcccagctacttcggaggctgaggcgggaggattgcctgagtccaggagtttgagaccagcctggacaacataggaaaaccccatctgaaaacacacaaaaattaaaaattaaaaaaaaaaagatgagtaagattcagtaagttcctaaccacaaatatttagaatttagtagaggaaataagacatgcaactaaaagctaaaatatatagattgaaaaacatcgtgcctttaaagagtattattcttttattattattaattttgaaataaactatttattgatatttatagtaggcaaggaaagacttagtaaaaggaatattgaaggaaagataggattttaagtcatagaaatgcagttgacttggacttaaccgtgagaggaaaatcattaatcagaaaagaggaacattacttttggagaagagtaaattttacggcttagctagttttgtttttgttttttttttctgtaaagggccagatacaaaatattttaggctttaaggaccacagtctctgttgaggtcttgaaggtcactgaattctgttgtgtaatatgatgccttcattgacagtaagtaaaaaaatagggataggcatatttaccaataaacatgatttacagacatagaaatgtgaatttcacatcattttcatgtcacaaatattagttttcttttacttttcccccgctatttatcattgtaaaaaccattcttagctgggagtccttacaaaaactggaagcaagccacagtcttccagtgacggagctagagtgttctctctaacaagtaacccctttgtacaatgtaacttcctcttaggccaatactaaaatcacagaacagcaatacattacagatttttgaaagagataattatttatcacttacattcaagtaacaaattcttgtaatttgacaaatcttgaacatgcctcctcaacttgcctcagtttgtctttctgtttgggggaggattaaagttcacaaaagttgaacttcaatgaagttaattatcagttaaggtagactgaggaggcagagacatgtaacagaaaagccaatccagatatcatttttatttatttggctttagaaagtgtttttctacttacatgtgagtatgggtgtgtctgatattctgggaatttacttcaaacaaaggaatgaagccacgcaatggcgatctgactcagctggagttgggaatccatctagtttccccatcttgcctcccgtcttgctcttctccatggtctgtttttacgctgtgtttagatgcctcgtcttctcagatcaatctaaatgctcacccacataaaatcacctttcctgaaattgtatttgcagagcagatggagtcctgtccatttttgcgtgtgtgttttttttaagtcttttgagatagaactctaacaaagtgtgctctgctttcaaacaaggcagtaattgagcagcattaagtgataatattgaacaacatcatggataaaccacaatgagagttgctgcaattgttatggaaatgtaggcatttgtttagtcttcaatttttttttttaacagaaaaggcaacctctgcattcactgcttacctgagatttatggatgaatgaaaagataggtcccttggagagttcaaactcttctgcagatattgtgtaacagattgcaaaataggtcttcctatcagaatatgtataccttagtgacagctatgagtttggaacacgaattatctatctgtggtaggtgttgtcgttgttgctattatcatccccatttgacagttgagaaaatggagttgcagaaaggttaagcagtttctcagtgtcacacagctagtaagtggcggtgccaacatagaagtccacttcctcaagtgttcatgcttttaaaaatggaaacaaaactctaacaaccgtcaaacagcaacgattgtcagaacctagaaaaggcctcttaaatttgcagtgttaaccaagcctgatgtggttccctagatcccctggctgccaccgctctgtgaagcaaaggaaaaactaattccttgctagcataacacttctattgagcattcctggacacaactcccccaggttctgaagagcctagggttgctatttgtttagttccccatggctgcttttcacattttctggatctttctcttgattctagcattataagtctacctcttccctgatcactcacttttctacctcctggagagcactgaccacgggatcacctcaccattttatttaacccattaggactcaatgccaggcaaaacctataccacagcctgcattgtattcaccatctcaggctcgagctctgattcctggggttgaggaaaggaagactttccaaccccaatttctgccatccatgttgattagtcagagggctaatcaactgtgaactcatgttctttggaactaggcagcacaggaaaaataatcattaaaggtttggtaaataaaagactgaatggatgcttagctacctgtcattatcctgtctcgcttttcgtcagcatgcaatcccaatcctcagctgttaagatgtagacaaagagttctgatgaaagggatttatttgtactattccaacagagtctgaaaactagcaggagcatttccataggtcgtctctcaacaatcctgtctgtaaatatttgagtcacttacaggcattgttgagcatagttctggcccagcaaatcttcctcctttgtatccctgatcaagtaaaaacttagtcaggatatacttgggtgaccttcacactgtacctcctccagaggtacagaggtggtgacgtaatcactgccacagctgactggctatggcttgcttgataagacgccaggggctacctatgtagattcccagggaggaactgtaggaacaaaccggtgtcaatggttaacccaggttcttggtgtctggagcttttctttcctttattattaactaaagagcattctctaccattgcccagctgaaagcacctagctcatagattctctgtggggagagtgaataaaggtaagtgctattattgctatggatacaatgtcattcagcctatgttttgctcttgctggcatctgtgtttggggagcagcaacactctgtttccagcaaacgtaaatattaatgatcaattaaatgcaattaagataatttaattttttatccaagtgctttaagtaggaatcaaacagtgtgtcatattccttaagttattttgaagctttggttaaaagtagtctcacattggtgtttacagagtctgttaaacagcccttgcctgctattatatttgtaaatgtctaaaagtggctttattatattcataccacatggagtattctgcaatgtctttcaaaaccagatttttgcatcctgtatgcacttatgaacatataattgcaaatattgaaaaatatgtattttatacccccctcttaaaaagctcagagaaaatacacgttaacttttttttatagttgtctataatcattgaaaggaaataagagatctattttttctagatttattttaacataaattgaaagtgaagaattttctccttttgttttcaccttaatccctctaaagcttttttttttttcttatcatttaaaaatcttaaaattttgttttgagtatttagtcagaaaagtgtgagcttgtaaaactttgctctctggatgccacgaattctctgacatatataattgaacagttttccttgttggtatatttaggtagtaaacaataacatttctataagccagatgaattttgatcatgtgtattacatggactgaatggtctttagaaaaagagtattggagtatttctgctaaatattactcttatggctagtaagagccagatcctgaagaagaaaaaaatgtatgaatgcacctttgttactttagtatgggaaatgtagactagccactctttatgtcagattttaaccaataaaggaacatgaagtacccaaaccacagctgttttgcagaatacatttaaggaattcctgaaattcagccaaaaagaatttaaaagtgaacaaggtccagagttcaattcaaatcaaaagagagagaaagagaaagagagcctgagtaacttagagatgtaatcctgcttgtttatttttagaacacgataattgtgataaatctaagattattagtctcatatacaacaagactgacaacctttgaaactgcaagaaaagactgctttgggagaggaattcaatattctattttaatgcatttttctcaacaagaatttcagcatgagagagaacaagagtcttcaaggatattgaaaaatatatgtttcttctattatatagattagtggtgagtacaagctaagacctggatataaattaattgaaaattagaaatggaaaaaaagtatagtttgaggcaaaatatataaagggcattgaaagtaaatatttggcaccgaaataatacaggtattttctttgttaaattagtaaaacctaccacttgtcctcatacaagaacttgagttccagcataagaagatcattgggagccatcttcaaagctacctcccaccattttccatttataaatggaactgtcaaagaagtcttcactaagggggtgatatttagccaaagacctggaggtggcaaggaagtgagcaacgtagaatccttggagaagagcagttcaggcagatggaacagccctaaggctgaggtgtgcctggcgagttaacaaaacagcaaagaggccagtgtggctgaagcaaaattgcaggagtgggagtagcagggaatacatgaggtcctgtagatgtgccataatatttaccaagacagatacgattctgcaagctacaagtgtcagagaaggtttttgagatgttagaaaagaccatgggaagcgtagatttagataagtggagagacagtgaggagtattgcggatgacaggctgatgatacaagtgaacaaaatatagatgtgagaatgagcagaattagcataagcatgagagcaaatgaagttaggctcctccagtgtacccaatggagtaaataaaaaggtttctgaacatcaaggctgtgctgaggctaacaatatgctcaccaacatgaaacttgtaagggaaacacaaatctcaacacagaagccaggccctctgtagctcaaaccagatgttgtcaagagacaggaaattaagaaatctaagtaaaagtagatttcatggacagtaaacagaattagaagtctttctccaaatgcctctttcctggttaggctgtgttttttttttttgtttgtttgttttttcttgcattttagtgagtccatccatcagctttggcatctccaaatggcccctttgctggaaaccatggtaataagggctcatcttctgagatgtctatgggaaatgaaagtaaactcaaatagctggttcttggttaaatttttcaggcccaagggcccagattcagaaaaaaaaaaaagatagtttatctgaaatgcattgcatgaagaatgctttcctatacaaagacagttacattttgctttcttagctggttagcttctgcagactgggaggagaactatttttatcatcatgctttagggcctatggaccctaggctttgtagttatttcactctgttaaacacaaggggtggatgactttatttttttgtatagctgcttttaaatgaaaaagataggatcagatttttttcctcaccttgttccagaaagttctactctgaaatcaaggatctggatgcaaaacataacattctaatagaggcttctcactattaaatgcaacttttcccagttgccatggctccacattctccccctcctaaaactagatctgaaactgctgacaggtgtataagaaaattttaaaaagtcaatcatctggggaaaaaacagtcccaaattagatttatccaacaactccgcataaaaaaaaggtgatttttaccttaacatgttccaaaaagatcacctccattcctaattttattttccttatatgaaaatagctttagagactccaaatggttacatggcttcagattgtattttgtaagatttgctctccttttaactgagaaacaaatattcagttatcttttttattttaagaaaaatgtgtgttctagcaaacatgaccaaaaacactcttgttttggtaaattttaattttttgttgtatcccattttaaatcagaggcatgttctcatgcaatcaataaacatttattaagtaccactgtaccggacagtctggggacaaagataacaaagatctggtccctgcccccagcctggcagaaaaaggcatgtctgtaaataattaagagccatgcaatggtccagcaccatcataacataacgtacaattagcacaccaaccaatcacacttttttccaggaaggcaagagggatgatagccaagtttgaggcaggttaatattgtcctgcgtgtgcttgtggaattcagaacttttagacactgaaatatcattttcactatgaactctattacacgattttccactgtcagaaactcactcttaagagaactcagacagttctcttaaaatggtctttttttctactaccgtttggttattagtcaaggatctctagagaagcagaagaaacaggatacaggagagcaagagggagaaaaacacagagagatcttaaggaattggctcaagcgattatggtggctggcaagtatgaaatctgtagggcgggctggtagaaattctagtaagagttgacattgcagtattgagttcaaatctgcagagtatgccagaataggaaacttggatggcatttgtatgttacatttttgaagcagaactcctttcccaggaaatcttggcttttgctcttaagggttgcaactgattagataaggcccacctacattatggaggataataatctgcttttctcaaagtctacagatgagaaatgttcctcacatctaatatgtatcttcctagcaatatccagacaggtgtttgatcaaacaactgggtaccatagcctagccaagttgacatataaaattaaacatcacaataacagaatccaacttcatcctgattgtcttttgccatccagttattagacattatatgtttcaagcttccatttctctaaaagaaattaagaatcatactttagtaatcatataaatattaaatttcataaaatggatctgcctaaaaataccatcatttgcatatagaagcatccattaatttagtacagcatttttattttattatttatttttatgtttttagatggagtctcactctattgcctaggctagagggcagtggcatgatctcggcccactgcaacctccgcctcccaggttcaagcaattctcttgcctccgcttcccaagtagctgggattacaggcacccaccaccatgcctggctattttttgtatttttagtagagatggggtttcaccatgttggccaggctggtctcgaactcctagcctcaagtaatccacccacttcggcctcccaaagtgctgggattacaggcgtgagcaaccacatctggcagtacagcattgttaatgctatagcttttttgtaatgcaacttggttaaagagaaaaagatttttttaaattgaggtaaagagtaagttatttctgagacactgacagtgacagtccaaccttctaatgacattgcttcctcttccattaaaatcactatccatatcatatattttggctgttacataatttcctccatgttttcatgtagttcatatgtatgagtcctacctctgaataactgtgtttacagtagtagcaacataccaagatctctgagaaaccatgtgattaacatcgtataccttttagaagtattaatttcactcaacaatttggacggggagtaaaagaactgagtaattttatggataaacactttaaaattattttcataatgcaggtatgactatatatccaacaataaatatatttttatatttaagactaaaagaaaaactatcataagaccgtggaatattttgagctcgggcccagtcatttgtcttatagcctcaaatacccctggacttggggtagtaataggggtaatgtactcatttatcttctgctttgtaaggtttattttttttaatggaaaattttgagaagtactattaaaggatgaattttgtgagggaaaattcctgggtttggttactacttgattagttagttggctctgccccagaaaaatatctactaacccacaaacttggccagtcttttcacaactatgtgctctcctcatctcatgtgaggctgagccaaacaatgggtaattcaggacattctgtctctacttcgggaaaataatctaaagtaagctcacaaaacaaggtgcctggcctaatggctggacctcaaaattgttcgctagatctccgattcaagattttcctatactgaagacagcacaggaggtctgctaaactagggcttaatagctctcaccagccagcaagtgcaagacacacttagccatatctgatgaatgaattcggttcttagctgacctgttagtgttcttgtaatatgttattgagttctatttgtttattttattgagaaagtaaaatccttcccagacttgcaaccaaaatttgggaagtttccagaatattagagatgatgagttatgcaccaggattgtcatatcaagaatgctctttattttgtaacttgcctttcatttggatcagaattgagccaatttgtgggtggttcgatctcacgcccaaggagaacgtggagtggctaatttgaacaaattatctaagacatgatttacacacatttaaatttaggctttatgggaataggaggtggtttcatttcctcatgactaaaattttatttaactgtattagataacagtattgagctgaagataagattaggccatttgcacttagaagttaaaagctaaagaaacattcagagagaaaaaactgaacaaagcaaatcacagacagacccaaacaaaaccaaacagaagcaaaatgcactttccacatgcaggaatcaagtacaatagaaatcagggcaaagtttttatgcattatatttctataggcagaatattgttcgtgtgtctctgcactattgtgtcagctcatccctgtttttgctgttgcaaacagtgggcactgtttctcgagttgtgtatggaatttggttgtgctctgttagggcagcttgtgcaacagaagcacaggggtatagagcgagcagagttaagaggtgagaaggagaagtccaaaattgtgtccttgagatgttacttgttaagagtcaccatgctctgtgtgtgtgtgtgtgtgtgtgtgtgtgtaaataagtgtctgtattaattattcacaaagtaataccatgataattgctatgccattaatacaacattgtggacctggttattttagacatgaaaataatagcattcagtgaccatgctgccactcagtaaacagaaggttgttgtcttttacactttggcttcatgaattgaacaaatgttctttcctttcttcttggttgatgtgcagtgactcgttctgttggtcactaggcatgtaaagattagtccatcagctccctgacattgggaaagtcaaagtctagcaaaggaggacactgacagaaaaaacaactgtgcctgggagatcaagggaagctttactgtggaagtaatacagtattcaggttttagctagaaggaagaaaagttgtctgcctagttataaagagcctaacagatttggggaaatgtgagaagttcagtgttcagagtgtagggttttcggtgtgaagataaaagcagagtggcagggggtaaaatggaatacaggagtatgacctagagagtaacttagatgggagaatgtttttagtgtccatttctaggcccccaaaccacttgaaactataattctaatactgaactccttcccagttacctgggactgattctagagagaggagaatttaattgaacatgtggagagcagagaagagataggagaagctaattagtgttttcctacttatcaaagacccttggttcagaggtaaggtaggtatttccaagaaatggaactacaactaacaccaaaaacatgacaattgcttgtcgaggctctcccctcttctgaagttgcccattccctgtgctttatacattggtattaacttgctgccactatctttatggagtaggtggccagaacgtcttttcacacctggatagagtgcttaagatggtagtagaaattcacctacaaagattcagttcttctacatactaggagataagtaaggtagactaaaaaaggcatttgtggatcagcagaaagaacactgggcccaaagtcaggagctgctgtcttcctattattatacatttattattattttaaagtaagtaattctccaccatcagtttcttcatctacaaaataaaaatatttccctcattcatttacacgttccctcaacaaacagttaataggtttgaacactcaaggtttgattagagaagcagaactacttggacaacatatttatctattattgagatggaatcttgctctattgtccaggctagagtgcagtggcacgatctcagctcactgcaacctccacctcccaggttcaagcaattctcttgcttcagcttctcaagtagctgggattatatatattatatatatataatatgtaaagagatatatattataatatatgtagcaggtgaggagaagtccaaaactgtgtgtatatataatacatatctatatgatatatatgtattagatatatactatatagacagttatgatcaacctgtattgtgtgtatgtatgtatatacatacatatacacatatggatgtgtatagtcaagtgctgcacaatgacaatttgttcaacgatggggtgcatatatgatggtggtctcaaaagattttaaagccatatttttactgtacattttctatgtttagacaacacaaatacttaccattgtgttacaatcatgtacagcattcagtacagtcacatgctgtacaggcttgtagcttaggagtaataggctataccatacagcctaggtgtgtagtagattataccatctaggtttgcgtatatacactctatgatgttaaaacaacatcaaaattgcctaatgatgcatttgacagaatatatcctcattgttaagtgacacatgactgtatatatatcataaaaatttgactttacacagttggtcacatattctatgtgaagctgacatccctgtatctggcactggagtctaaagttgtagggcaggcaattggaaggacatagtggtgtgaagtggaggaagatagaatattgaaaccagtgaggattagctagaagccaccaagatgaaatgaagcccatgttggtgtcccatggctttcgagcctccaacttcataacaggggtggccagcagcacagtaccctccctctgtaacacaggagccatagaaactgaaagaggagaccagcaggatgtgtaggcacagtgggctcacctgccaatccataatgtgtgccagtatatcagtgacaacctgcgtgggtcgcctgagcaccttgtgccctacagtgacttgttgtggaaagaatatggctactggttcacttccaccttacataagtcatgcaagatgactcccatggcctgaaactatgaagggaatggaattctgagacacgtagtctcagttagttaaattggtacaatccaaatataccacatctgacacgtccattcagaacaaaaaacaagtgatagagacattgtccctgacattgaagagtccattaagtggtaggagagagtcataatccacctgatgcgtgttatgatagaacggcttgcttctttaacacacataaaatgagattaatacacacaaacgagctttggaagtgttaaacttttaacaatttttcagagtctcatgttgactatctgatgtttgattacctctatctttaaaagcaaaacacaaaggaatccattcatggtagacattttaataagtttgaattctgtaagattccctggtctttgcttcatttcctctggtagagcggtggtgctgaatggatagcaaccacgtcccctacactaaccccagtccttttgctcatggaattatgctgattttgctaatccaccaaccacttgccagaggtgtttgccccgctttcatatagcttatctctcctttaagctgaggaaaatgacagatacgttaagaaacactagtaaaattccttgatcactaataataataataataaaattaaaccctcaaatgtttataccaaacctctattgtgaaaactacttgtttatcggcaccatcttctatagatttttgttctatttctttcttagattgtgtttggccaacgctttcatcttaatcttctgcctcagtttatcttccttcaaggctacttagttgggtagattttgtgtatttcaaagactccatgttttctctgtatcatgaagatactgtcacaatgacaggtgagctcatcatcttgttaaagggtttatttccacatctcaattgttctgtcctcaaagtcacaaaaagaaactatttctgaatctttcgtggaccatataccactacatggagacacacaattttcacctgccaataacaaaggaacatgtgtcagacattacattttccatttatttttaaatttcacaacacagggttctaaacctgtgccatgcaccattctaaatgctttaaaaatattgattcggtcttcataacagactttatttttatgataaggaaacagaggcactgaaaggtcgggatgttctgatgtcacacagccagtaaatgacatagctagatttgaactatgtagtcatgtagtaaaggtatgggcttttaaccagtagtgtatgtcttctaaagagcctcaattccccataaattcatatctgtgttattactggagatgctaagttatattaacacgttctttggattacatacccactagtcaagacacctttgtacataactccaagtgaaatcctgagaaatgctcaggcattgaaataataaaggagaatgaaaccctaccacctcaattctgctctatgcctctgatgattgattttattgaagtagtctatttcatacatcaaccgctagcttattctttctctatcaaagcatttaaggaataaaaaaagcaaaccacagagaatatcttcactttattcaatgggcagaacactagatgttccagcataagaatttgttatttccctcaaaatcaataaatacaaacagaaaaatcaataaagattttactccattgagcaaggataataccaaatctaacgaaagtaatgttttattgatgggggaaaatgtaaccattctttatggtcccaacgacagatggaagtttgctgccttttataccaaatattcaactgtgacaccatttatttgatggggaaaatgtcaataaaattagagcccaataggcctcgacaggtttctttagtttaaaaagtctttacttaattaattcaagataatataaatattatacaaatattgatttgttagaaatactgctcttgatatggaaatacttacaatgagaatttttgtgagaaagtgaagcaatcttaacttttattttttattacaattagttaatgaagagtaacaatgatctgaagtcatccactaaaatattttgtttgccatttattgcatagtaaattctgtatttccttggttcagaacacatattactaatgaagtcaaacgtgtattttcagagagactatcaaacaaaagccagaggtgagcacaagaaaagtgtatttttaaaggtaaaatatgttcagtgttctgtgaataaaagaaaactgcactgcttaagacaaaaagctgttaagattgtttacagatcaagaaattattttacaaaaatggttatttattcatcatttttttcaacatccatggaagaatgcctcttgaagaaataggatgtttactatttaagttgggaaaaaaattggcagttttcctatccaagaaacgattagtacattcatgttgaggatgactgggcttctgaaggtccttataaacttcattttagtgtttggcatttccttttacgtaattgcagcttttaaactaaagatcagatcatacactggcatatttttgttattcttgttttgtgcattgttggtacaatttctgatttgattcctgatgaaaataacaaacaacatttgtggtagtactttggaagttaagccttttacatcaattgtcacattttattatttatttatttatttcaagacagagtctcactctgtcacccaggctggagtgcaatggtgcaatctcagctcactgcaagctccacctcccgggttcaagatattctcctgcctcagccccccgagtagctgggattacaggcacctgccaccacacctagctacttttttttttttttgtatttttagtagagacagggtttctccatgttggtcaggctggttttgaactcccaacctcaggtgatccgcctgcttcggcctcccaaagagctgggattatagacattatctttaaaacaactctgtgagagtagtgagaggaagtggtagtagaattcttattatggcaataggaatactaagactcaggtaaattaagtgatgttagtgtaagacagatagggaaactcaaattccagggtttcaattctggcctctgtttttctttcatttaccatccaaccactacagtgtcctctttcctcttttacttctgtcatagaaaaatcttaaggaggccaggcgcggtagctcacacctataatcccagcactttgggaggccaaggtgggcggatcatttgaggtcaagaattcgagatcagcctggccaacatggtgaaacccgttctctactaaaaatacaaaaataaaattagccggttgtggtggcaggcgcctgtaattccagctattcgggaggttgagacaggagaatcgcttgaacccgggaggcagaggttgtggtgggccgagattgcaccactgcactccagcctggatgacagactgagactctgtctcaaaataaataaataaataaataataaaatgtgacgatgtaaaaggcttaagttccaaagtgctaccacaaatgttgtttgttattttcatgaggaatcaaatcagaaaagtaccaacaatgaataaaacaagaataagaaaaatatgccagtgtatgatctgatctttagtttagaagttgcaattacgtaaaaggaaatgtcaaacgctagaacaggtgaatcgcttgaacctgggaggtggagtttgcagtgaagccgagatagcgccacgccactgcactgcagcctgggcgacagagcaagactctgtctcaaaaaaaaaaaaaaaaaaaagtaaaagaaaaagaaaaaagtttgaaaaccagtagtctaggccaaggcacctcaccaccacaaaactgttttcttttcaaattggatcaacgatagctgtgatacagagcttttagggcagcggtttccaacccttttggcaccagatactggttttgtagaagacgatttttttcacggatggaggagagaggggatatgaaactgttccatctcagatcatcaggcattagttagattctcataaggagcgcacaacctagatccctcggatgtgcagttcacaataggattcgtgcttctatgagactctaatgctgccgctgatccagcaggcggaggagctcagatggtaatgctggatgtctgctgttgctgttcaccgcctgctgtgcggcccggttcctaacaggccatggactggtcccggtccctggcctgggggttgaggacccctgtcttagggatattggggcaatgaaattgaaacaaccaactcataacaggcactttagaaatggtaacattcccaggggattaaagcttgtcaccagggttaattccaaattattcattaaattttgtcctctatggaaagaaaagttacctcttttgggtaacttatggtacactttggctatattcaaaatggttagtggctgccattgaaaagaaatcaaataaggccaagtgatttttttttttctaactaggaaacttaggaaaaaaattaaggaggtggcatgacctgtttatttatgtgattctgaccattataccacaatagttttgcctagtggccgattttagtcctatggcttgaatgacttaaaatatgtagatctaatatggcttggtaatataaaagtcctcagtttaaaaagtcaattcaatttaaaattgaatttaaaattgacttttaaaaagtcaaattcgattttaaaacttaatgagaaaaggtttttagtctcgtttccaccagaacgtgtgaaagttttctttcttttgcttttctcattttgtaaccggctactttggtcctacgttgctgtatgtaacacaggaatacaaacaggcaaatcaagccaatttcttcttctgatccctatatgtcctcttcctgaacctataaatggtttcaattcatacagtagttgttacgtatcaactctgtgccaggtaccatgccgtatgcttggggccacgctatcctcatttatttcactctttttctgaggactgttctacagcaggaattttggggtctaagccacttcagttggccccgtaagtttttatttttaaattaatttaagagtcttgcataatttgcatatgagttttaattactagaaaagagggaataagtatgtttacttttatttaactctcagcatttccagattcctgaagttgaaaaacatcacccaaaaccatttaaaatttttgtttgtttgtttgtatgttttaatagttcccaaaggtggaatctgtgacttgagggaggcagtgaaaaaaacataatgcctgcagttactgaagcataaaactacagggtttccatagttgctgtagtctataacccgagggcactctattaaataatcttaacttgctgggaaggagggaaaacatttagctataaactagacttacaaccgcaagtgacattttttcaaaaggttaccacatctctgtttatcaaatttatatgtacataaaaagattaaaagttagttactccagtatttacagagaacacacacctctgactaactctgtttagaatctctaattatatcacactcaagataaaggccgatcctgctaacactttgtaaccgtggtaataactgcttccaccactgcaggtctaagtttaaattatgcactgctgctttgaaagaggggatctcgacagggaaactggtgtagtccacttccatccagcctcaactgtctcactgcacctcaaggacactgttaaatcatttgcccaagcattaatttttttagcctccaccccagatttaatcacttacttatcttcctgccaaagtaattgtgctggtaaaacagggcaactggaatctaggcagaactggctgtttctgcttctgtccaaagggacagggatggaaaggctgatggtggtgattttgtgattgaatgggggtaattgttctgggttttttgtttttccctttaaagaaaattctacaggcttgaaaactctaagataaggagaaaagctgacctaaaaacactgtcatctcacaaacctttagctagtagaaaacagatcacctttgttacattttggctggataacattgcacacattatttgggtaattgaggtcaatggaaacacttggactttattttcccaggtacttttcttttctagcctgaattatgagcctcattctggcacagagtcctacttacagaatgtgttgccaattcattgggtgcatttagtaagttcatacgatagacattgaaaaacccaagagtatcattttggatgatcaggctctatagtttctcttcagtaatttttgatttatctacccgggttagcagggatatatgaaatagtgcacaataccgctaacccactcacaataccgctaacccactcacaatacggctaacccactcacaataccgctaacccactcacaatatggctaacccactcacaataccgctaacccactcacaataccgctaacccactcacaataccgctaacccacttagatcacctgaaaaagtgtcaaccattttgtttagctcagttgccagcaatgtaacaaaaacattgtccagaagtattctttaggacatttgtggctatgaaacaaagattcaaaatccttagcctaaccggtgaatgttttcccagttttgactcagcttgatcttttggccttctctgcctccacttctcttatatgactccagccttcccactttacaaaaatgccttgtttctttctcccatctggagaatgttaagttctcccctacttgactttcatccatctaagcatatctttcaaagtgatagcccaatctaccctttacacaacaccttttcagaagaattacaccaatcatgagtaggtcctcctcagaactcactcatgctgtctacttcctctcctactcatttgaccatcatctgtcaccatttcccactcatttgactgttaactaaaataaaattgaagtcaaaacacaacttaagtgataagataatttcctgtttgttatatcttgccttctaaatagcttactaacttcctgtggactacaatcacgtcttatacatcataaatttgctaacaaccagctaccctcctccaacacagtgcaggagaggcctatggaatagtacgcatttacaggggtcaaagaatcaaaatttaggcttaggaatgataaataatgggattttctccttaataggatttgctgcaaacaagtaaacatgcagtatttgtttggggtgctccttccactcagcaccccaccttatcccccagtacacatacacacacacacacacaccactcctctgatgtttccatggcatctattctactggttgcagaatatagttttctgctgttttcccagataagcctttagtttcttgctattacctaggtagggcttcattagacacttaagggctgctttgcttgaactgaatacatacccttgaatcatcctgatgtactttatcaagagtcacctctcccttacttatttccagggcaatatttacatttaatcggggagtgtggagttcatcagtctatgcaagtaaatgttaacattccatgtcctgtgacagcttgggtgagagctgtaatttattgggttggaggggggttgtggttatttgcattgtgtaagctaagcctcattcttaacacagaaaaaagaatgctacacaacaccaaaaaggctaaaatttgttttgcattataaataacagaaacctaaaacatctacctaaaagcacattggaatgaaccatagcaagttcctaattttgtttttcattgtgtttttattgttttatgagtcttagtttccatataggatcaaaatgactcaaatcacatcttttacataagtgttttctacttttagcctgtatatttacaattatggaataaaccatatatgcaagtttaccttcctccaagaaaatatggatctgtagataccatgtgaagtcaaagaacaacattttaagatttttatcacttcctgaccatgggatgttttacaacctaagaatagcatttctgaaaaacaaactcagagcatgagttatgtaagaggcagttggttttacagttcgaaataactgaaatatgtactagtccattgtattagtcaaggttctctagagaaacagaaccaatagatagatagatagatagatagatagatagatacatagacagatagatatagatagatatagatagatgatagatatagatagatagatagatagatagatagatagatagatagatagatgagattcataatgaaaactgacttattcaattatgcaggctaagaagtcccacaatatgccatctgcagctggagaactagaaaaactgtgctgaaattcagtctgattaagaaggtctgagaattttggaagccaatggtataaattttatttaaagtccaaaggtccaaaaacctgaagctctgatggctgagggaagaatatggatgccccatctccagaaaaaggaaaagatgtttgtccttcctccaccattttgttccatccagaccctcagcagattgcatgatgccccccacattagcgagggcattctttactcagtctactgactcaaatgctaatctcaaatgccagacatcctcacagacacacccagaagtaatgttttaccagctatctggccaacccttcgccagtcaagctgacacataaaatataaccaacacgtccatcaatttgcaaaggttgaaagttagtaaaagattcctcagaaaggaagaaatggaagaaaatctgaaaaaggtgaaataaccttttggacgcaagtgtggatgctctatagtattatttgtctaaggctgctttgacaaagcattgcaaactgggtggcataaaacaacagaaatgtattttctcacagttcaagaggctagaagtctgagccaaggtgtagtgttgggagggccttgctccttctgaagcctctaagggagaatgtcccctttccacttttagcttctgctagccccgggctttccttccttgtagcagtgcaattcatcttcacctgaattcttctgtgtgtgtgtgtctgtgtccagatctcctgtaaggacaccagtcgtattggatccgggcccactctaatgactttatcataacttgattacatctgcaaagaccctatttccaaatcaggtctcatttgcaggtactaggagttagaacttcaaaatttctttttctgggacacaatttaacccataatagatagtgatgacaagaaaatgagagactccaggagattccatgctttccttataaaagggtagagaaacatagtgaaatgaaggagggctttgttttcattttcttactaataattctttcttttactgtgcttttagtttcttatggccattattgggaggtaagataataccacatggaagcacttatttttctacttattatttaaatctttcattcttttcaagaggcttggccaattattctgtaatttgccataactattggaatatggttaggtgtcagcaagcaggcgatcttagtacagataacaaaaaatagaacatgtttcacaaggagtaaggaaaaaaaaaacaaataaaaagggcaaataaggggaataattaatgatggattaggaaaggtgaaagacatgaagcattgtcaaaaatatttatcctataaacttggtttaaattgcgatttggtattgatgcaatggctcatgactcaggttttcttccataatgtctcttgtgccccagacagccctgtgttctgaagcttcctttatattttccagaattcacagcctaaagagaaataacaattgtgacatttgcatttacttaaggctttggaaaaactcaaagtgaaaataaaagtaaccttcaagaattgtctccatggaataactgtctcaactattttggccaagactgtctttaggtctttattttcatggcaggaatagcaatagtttcaagctttggagggtaagggaagttggaaaggtgggaatatcaattgtatctttctacaagagaaaacatctacatgaagaaaacagtagtaagtgttgcaattagaaatttgagaaattgtaaaagttgaaagaacttgaactgctaacaattaataaaagtatgtattttatctacagagattatctagaatgaaaggatgggaaggtgaggtatttaaattattgtaaccatccattgcacttatttattagtcaatgaggtgaaaggtggggggaataacatatattttcttaattttttgtgattaaacaaattcgaggtggtagatttgatagggctgaaatttattataccactgtcccccgcaggtttgaaacaatttaggacgctacatagaattacacttgaaagtaaattgcactgtaggcaaatcatgtttccaagaacatgacacatcttactggctagagttaaccagtcctgagaaacggcaggaactcttgctctccaaatcctatcttgcaaggccgtagaatttgtccacagaaaatcatcaccagtcatcactgagcatttgtcacagtaggttttattaagttcagacagattcaattataattaaatcaatcaacctttcatatattggctaacagacagacttctaagaaaaccaagcttccctaaaaaaaagcaattagatattattttcttgattcaacttatgtgagcatatgaataatttacttttgtttgtttaattcacaaatagctcaatttataagtattggtgtgggctataggcttaagaaacatgtttgtgtaaagctgctgtcccacgtagcatttaccaccatactatgttttttatcttgagatgctgaatatacaaataaatactggccagaccatgtaagacaaaacaactttgaccataatctctgcaggaaccagcccaggaagcccaatcataacctttgtagccatttggcccaaaatggtcagaacttggtcaatgactctcagctttccttatgcttgccttcacttctaacctagaaccaaccagaaaaagaaaatgtgctcctcaaaccatttatagaggaagcccggcttccacatagcctacctccagcttcctcagccaacagcttttgatcagggcaaacgtgaagcttttctactctttctactataaagattttccactcctctgcctgcctgtgagtctctggcaaacaaaagtgatcgtgcctgtcttccttgcaagctctggataaataatttctgcttgttctggttcagatgatcgttgtttatttccacaatctttattaggatctctatacagaatcttttaaatggcaagattagccctgcccagatttaggaaatcatttagggccactggatatcaaatgtggtaccaaaaaaaatgttgaaactgattcaaacttgggtcaagatccctttgatctagctcaaatctgtgataatttggcattttatattacttaatccttttttttttttttttttttttttttttttgagatggagtcttgctctgtcacccaggctgtagtgcagtggcactatctcggctcactgcaagctccgcctcccgggttcacaccattctcctgcctcagcctcccgagtagctgggactacaggcgcccaccaccatgtctggctaattttttgtatttttgagtagagacggggtttcgctgtgttagccaggatggtcttgatctcctgacctcgtgatccgcccacctgggtctcccaaagtgctgggattacaggcatgagccaccgcacccagcctactcaatcctttttccagtccatttcagcaaaagcctcactgcttgtgagtgtcctgcatacagtctgatttgggtggttgttttctttgtggaactacttagaggtcatatgacatttgcctgtggatagttcaaattggctctattttcttaggtccattttgcccttattcactgagaaatatgtggtctctcatataagattgtttccattgaaattctgccaataccttttattcaacttgtaagcatggaaaagtattatgaacttatttaatttttaatttatttaaaaatttttatagtaacattagcacctaccttctaaagttgtttgagaattaaaggataatttctgtaagacaattaccaaagttccaatatgtaatgcttattcaataaataataactatcattattattacatcataataggtgcctatatttctaaattaacaatcttttgtactattgatgtgacaatatgtacattaagtggggtgaagaattaagtcattctcttcataatcaggtgataacaaccttctcctttattgagaatcaagcatctcagagcgagcgtgaatggatattagagtttctgcctcagtgttctcaacagcttctactggtaaagcaagttacagctagtaacttggtcagggtttttggatataaactttattgtttagagtgtagaccaacctacatttaaaatatgatacttcagaagtgcagaaaggtacgtgacacagccaactgaagaggtaacatgtcctaacatattaaattttctctattctcttttgaaccctattacaatcaaagaaatctccatggtgaaatgctcattttgcagacacgatattgtgtaagttttatttcataatcacacaaaggaaaaattcctgggcattttatgtgcacttttgttaatgtgatcacagatacagagttagccgttcaaccccaaacgagacatgacctcactgggaggtttgttcgttcactgcattacggggatccacacaaaggacatgtcaatggcacaacccatgcgcccccgtctccccactcttgtcaggatttgtcctgggaagtttctagcaaacatttttggagcaaatattttgtgagaatgtcactgtttttgttagaaaggccatttaggggtctaactaggaaccaagaatggaatgagttaccttattaaaaattttaaatcaaaaagtgtttatattgtttggtgagtttcagtagaaattagaggaggaggtcaggagcaggaggatggagaaataagagctccatcaggagcaccaggaatgctttttaaaaacatacatattctattagattctcaaggaaatgtgactaagaacaggccctcatcgcagccccatatagcatagttttcaatttttctacagtgactatttcaaatattttctgttctcttcaaatctctactcttgtctcctttacccactacccctatttaacagggaaaataaaatcacaaacttcttgtctaccatccatagacctgattgcatctgtatccactctttccttgcaaagaaccttgactctttcccatccttctactctgctccttcacctccattttcttctctttccttcattatggatttctaattattgttgattctgacttccaagtccctcttgaatctgtttcctaggttatgacctcctcctcacttgtctgaccaatctgttctcaacactagagccagaatcttaaatacagatcttcagtgttttatctttatgctaatcagattgtgttagtctcctgatcaaagctctttaatgctttcctagaataatacaaattctttaacatgaattaccagatgctgcttaccactccagctctacctcatacttctccccattttagatcccaggatgcagccaagtaataatttaaaaaaaattttcctagtaactctcattcagtgtgaacacagtttgtctcaacgagtttggttcagtatgaatagagtaagggtgtaaattgcacccttggggaaatgtgactcaacaagtaactactgcagaatggattcactggagaacaaaagcaaacatattcgtgctttgaagaatttaggagtcaatcaagtgtggaaaaggctaaacataaaaataattttattcatgagtacagttctaacttgaatattcataacattttattaatttatcataaggacttaaatgctgagttataggaaaacaatttaaaaatttaagataaatcatttttgccatatgcctcttaacaagacagcagttgaaatcttctttcttttccctttgattaaaaaaaaaaaaaacctttatggcctagtggcatataataattgtattacgtgtgtgtgtgcatatagatattattaaattataatgtacactgatatacgggctttccccaattttatttctagcactgtcatcgaagattaatttttttctgactcaaatattagaagctagaagctttttctatgactttatgtatttcctccactcatagtagctttgaagttgaattttgagtggaatggaacctttgaagtagaattttgaacagaatctggactgatatggggctggtcaaacggcacctcaataattatgaattaaaatatataacattttttaaagacattcaaagaacaaccaggtgttgagcaaattctaagtgcctgagccagctcccactagctcacaagagctaactgtttacacctcttatcaaatccacattctgaagcctcatatcagtgacctgacatcagccatgcgtggagtatttacaccacagaaatgaaaaactctacaaatcagtcctttgatttcctccagagaggcagttaaaatgcaccagcactctgcttcctatgaataagttgaccatatatcacagcagtattgattgatgccagttgtacttctgacccatgattttcacttttgtccccacccttttctctgtcaaaagtgacagattcaacaatcactatagatatcaaggaaaataatataatggagatttttcactgcaagaaatgaagactgggttagaaggtaaagaagcaactacaaaatgtttatctttatgtgaagaacaggctcctggaagtagtacgagacttgttttgcagagcttcaggggacagcatgaggacaggaagatcttgtgaaagctatagggagacacatttttatctgagtttaaggaaggacttcctcatgggtaaggtctagtcatcataaaataggaatagaatgcatttaggggtgaatgaggtcttagtccacgaaaacagtcaagtagagacggacagccatcttgaggggtgttgtggaggagctggggcaataaatgcttgggtgttaatgcctttctcatgattcatattgtgggttgaatctttctcatggcatttcttcactcagtcattttggcaatcctcagagggtctttgcctggtgctatgtgtgtttgggagtagatacaaggagaagaaaaaaataattcgctcaaattcacacaaaaaagtgacccaaaccaaaatccttattaagcctcactgttaagttttaaaatgatatgatgatcactaatttgagaggaactacatgttagccaacccatcactgatttatttgtgatttcagattttgaaatctattaggataatcaatttcacttcagcacggtttggtcaaagaaaggaaaatacatcagagggattcaaataactttagaatcataagtagtgtgagagatctacaggaggaaagtccgtttagcagtgagaacttcagacacttcctctatatcctatggtaaccaggcagttagaataacaggaagccctcaggccggcaaaaatggcacctgtgaagtttgtttgggtctatctgaaggcaggatttcagcaggggctgaggctgtacagaacaacttaaaattttcagttggataagaaaaatcggtaaaacttaaaaattgtattcatttcctaatgcctacgtggtattacatataagtcagacaattgttttctctatttcaaattactggattagtttgattattatacggactatcagaagaatagtggtacagcttttctccaagatcaacgcctttcatttgtggatcttccatcttacctgatacttctctgcccgtgtcttcagtactggaatttactccagtacttcttattttctgtttgtcttttcaccacccgaaaaacattactctcactcaccaaactatgtacacctttctttatattctcccaatcagacttaacaaacacttagatgacatttatttttgcctggtactgttttaagtgctttacaaatatgaattcatttacttctgctaagagctaatatatttctattatcttccttttacagaatgggggattgaggcacagagtgttaaaatagtgagacacaggattctaactggcagactggcactttatctcaattcttaactgctgtgttgcctctcactttaaaggtaagaaattaaaccaattttaacatgattctccgaaaaaccaatacttgcactccttcctccatgaaaatgtgctttatccctacgcatttttccagaagtccagctttctacttatacgtttatattttcataaactttgctacagagcaaattcggtgttacaaacattgcttccttttgttcacattttacacgtttactgcctccttaaatcattcaccttcactgtattttaggaaagaaatgctatttatatattttgtgaatccacagtctattatacattctgctaactaagaataaaacttgtctacttggttatttgagtctagagaatgattttcaacctggagtgactttgctcaccaagggacatctggcaatgtctggtcacatttttggatgtctctactggggtttggggtcatactggcatctagtgggaagagtttagggatgctgttaaactaaatgccataaccacaggtcatcttcccacaacaaagaattttctggccctaaatattgaggttgagaaacccagatctaggatattctgtgcatttaaaatgattccgttcagaacaatttaggtactttctcaatagtactgcaaaagctatatgaaaactatatgtatataaaaattatatctatctgtctctagctacattaacatatcaatctgctaggttaagtagactcaatttaaccatctggtgtttcatgtttgcttttgatttgtaaaagactcagacctataacatagccttaatgctaatatcattcttgagataaacgattataattgcagatttctttttttttgagaaagagtctcgctctgtcacccaggctggagtgcagtggcaccatctcagctcactgcaaactccacctcccaggttcaaacaattctcctgcctcagcttcccgagtagctgggattacaggtgcccgctaccaatacttgcagatttctttagtgttatgttatttagccactcatccatttttttaaagatttaagtattaagcattcactgtacaccaagcaatgttcttagtgaacaagtaatttagaattagattacaattaaattgtggattttaggacattttagttaacgtttactgaaaagtattatcacagaatttatattttctatagtttatgttgttttatatgattataaaagcaatgatttaagaattaagtgaagtattttacatgatgtggaaaaaatgagagaaaaagatggaaaagagttgattgaattattcattttcacctgattagttgaagccagtggttagtaacatcacatgcacaaaggacccagtggctgattcaaaatagtattccattctctccccatgattttacaatgaaactacgagaccaatcaggacaccttcttctttcttcttgttcaccaaaagtacttttttttttttttttttttttttttttttgagatggagtctctctctgttgcccaggctggagtgcagtggcacaatcttagttcactacaacctctgcctccccggttcaagcaattcttctgtctcagcctcccgagtagctgggactacaggcatgcgccaccacgcctggctaatttttgtatctttagtagagacggggtttcaccatattggccaggctggtctccaactcctgacctcgtgatctgcccgcctcagcctcccaaagagctaggattacaggcgtgagccaccgctacctgcacaagtagttatttttaatagcaatgacacacaagagtaattgcaggacatttacttaactaaaaaaatcagttggcaaaatcttatgtgaaaaattaaaacaaaacaaataaccatttccctgaaaaattaaccccacttggacctccacatcctttcccatccatcaccacatttttctaccccatttgacagcggaactctctgtaggctttctgcatgctttcaacacttcctgtcaccgtttttactcgtccctagtcaaatcaggcatttatctccaaaactctgttgtgacatctttcatcaaggtcaccagtgacatcacactgctaaatccaatggtcaattcttgtccttatcctgactgattgttaatatctaacacacatgatcactgactttttctttttcctttccttttttttgagacagggtctcactctgccgctctggctggagggcagtggcatgaccagggctcactgtagccttgacctcctgggctcaagtgatcctgccaccttaggcactcaagtagctgggactacatgtgtgcaccatcatccagcttatgtatattatatatatatatttaatatatatatttatatgtgtatataatatatataatttatttaatatatatttatgtgtatataaatatatatgtgtatatatatttttgtgtatatatatgtgtattatatatttatgtgtatatatatatttatgtgtatatgtgtatataatatgcatatatgtgtgtgtgtatatatatatatatatatatatatacacacacatatatatatatttttttgtcaagacagcgtctcactattttgcccaggctggtcacgaactcctgggctcaagcaatcctctcgccttagtctcccaaagtgctaggattacaggggtgagacactatgcccgaccacactgccttttgcttgtaacactttctttacttcgtatcacatgtcacaatttttcctcctacttcaagcaattctttttctcagtcttcttagttatagcctcctcattttcccagacttaaattaggctgtcccaggccttcgtcattggaatccttctcctttctaactactctgactcttgtattgtttcatccatgttcatggttgcaattactctatgtacactgataacttccaatcttatatttccattctgaaattctcccctgagctccagactaatatattgtctccttgacatgttcatttggctgtcagaaagcatatcaaattttgcacaataaaacaccaattattgatttcctcactccaaaactccttttctaccagctccattatctgagtaaacagcacaagtatttactgtgctatttattgggtaatggttcatttttattttattatcttttttttttttttttgagacaggatttcattctgtcacctgggctggagttcagtggtgtcatcctagcaaacttgcagcctcgatctcctgggttcaagtgatcctcccacctcagcatcccaggcgatcctcctacctcagcatcccagatagctgggactacaggcacatgctactgtgcccagctaatttattttttatttttagtagagatgaggtttcactacattgcccaggttggtcttaaacttctgagctgaaaccatcctcctgcctcagcccctcaaagtgctggaattacaggaatgagccactgcacctggcaagtaatgcttctttacaagaaacttgctccctctctaatctgaaatttagaggaagcaaatgaacaaacagcaaaacaagaccagcatgttgaaagaacatctaaactttgtccttggagtcactactgaggtggctgatagtctttctgggggcatacgcttccttgaaacccaaatgaaatgatgttgggcaagatgctgtttgccataggtatagggttacatagtcagacaaagtgtgcatttgcatagaaaaatctttgctgtcacaatcacagagcacctacacttaagaagcacacacttggaagaggttgtacaagacctagaggtgtcagtaagagaaaatgcagccttccaggacaataagaaatttaggggtaatgtgtggccacttttgtgatatggaaagatttttattattatataagcttccagaggtttgatcagaaaacaaagatgtaaataggcatggaagaaggctattcttggttcttgttttctgtccgccaccattggcaagactatctactatgcgtaggcatgggaaccagttaaagaaagtgtcgattcactagagcgaagctgagaactcagtggcctttgtctgtggtgaatgtatccggaaaggcaaagaagagagagattctcctgtggggtttctcatctccatggcggtaggtgctgacagcttcagaagggtactaacagggccaagagaaaagggccctgagatgctcagctacggtgctcttacaagatgaaaaggacatggggttcagatctgcacttcatcatctttcactaaggtaagatcgtgttgtggattaaaagtgttccaagcttgaactaattgcttgtcggctcttttaagctcatcctttttgcatgtatccccgctaatatgcatctttatgatgctttttttggctcagcagtcatgctttatggaggcatgctctatggctgggaataggttttctttctctcatatatctctggggaatgctgagccaaacagattaaaaatgtcagtgccatttgcagatccattaagggaagtaacattcagagacagagggagactaaaaggatgatgacttagccagctgacataacttactgacgtggagcaacgtggaagaggtgaatctttcatttcctgtggaaaacagtcattcataaaaccatcttttttgtatgtctttgtcactcttccactgttgcaaagtgacagcaaagtagcatcgcaaatttgaaactgtgtaataaaatacgttgacatcaatttggaattacatcttcacaactaaaaatatagacagaaatgccgtaaagactctttagaaaaacaactgctaaaaggtaacttcaataaataataagcccttcaagcattgaaatctgactaagtataaaagcacggggctttcgaacttttaatgtttttcttctgctcattgctttctttcaatttgtaatctggactgttgctatggagtaaataacacctactacattccatgccttcaggtttccatttcactagaagaagtggcacaagttgaaggaaggcagcttatccatgtgaaaattctaagacagtatagatgcctggccatgggtttagccataaatgacttacttatgaaacatgttaagcttttctgtttaaaatccctcccctgccttttaaaaaatttcccatgaatcttgaaataatcctgagaattcagatggagtgcgggtattttttctaattgttgctcagaaaatccttgatccagtctgagtgttttgttatcattgagccatatgcagaattacaaaatgaaaatgaaaacaggtcagctaaaattaagaagtcaatgcaaggagtaaaggcacagataataccaaaacatgagtcaggatgatctgtctcgttggcctgacaaatatggctcaaaattattttttttaaaaaagattagaagttctgaaagtctacaatctgcaaggtagagaccaaattggctacgcattggcagtgtgaccttcccccaaattactaagcttctctctgcctccttttcaaaagcctttactagtatctatatcttagatattatttaatttcatttgataattgtgtacctgacacacaaggagcacagagtaaatggagacaattattgttagctccattttagagaggagagaaactgatagagagagtgatagggggttaatagctaagctctcagtaatataccaagtggtgcaattccaaagatacatgttttgctctcaagttaagaaaacacaagccaattgcaattttgtgatgaggaagatgggatacagttgcaatatcaaagctgcctctgacaactaataccagccctgacctgcttctgccatggttttctgacctgcaatatttaatcttcagctttcagacatccacattccaccctggaccttgcctgtctggtaagcccaatctctgcaggtcagccatgcagctgaggtgagggaaggtatgttgggatgggctggcatgaggagtcatgggggtcgagaagaaagttatggcaagagacattcttttgtgcgtgcatagtttaacagagacgaataatgttcattttgatctttattaagaggtggcctcttaataggccacccccttaataggcctcagaatatctgctttaaagtggctttttcctgatggtttcttctaccattgttacagtagctgcctcaaatcagccaaagcagaagttcctattttgcttgagagcttaggcttcaggcaaaaactactgacatttatgagatacctagtattttacaatgctatctggttaaattcttataattgtccttttaaaaagacagagaacacagaggtaaaataactgctctgagttcacataggcaaatgttggagacgagattcaaacagaaactagactgactcaaaaatcaaatctaagtgatgaaagtaaaggtactgttttgtttgcatcacttaataattcatctggaatcacaagtcatgataagaacctaataagccatatcatcaaaacctgagcttgggtcaccttcaagatgcaacacacccaacatcacagtagattcaggggcaccctgaaacacaagagtaagaaacagaaacatctatccttagagactacccttgtagccattctgctgagttgtatttttttttcattgttgcttagaagatccttgatccagtctgagtgttttgttttctttgagccctatgcagaattacagaatgaaaatgaaaacaggtcagctaaaattaagaagtcaatgcaatgagcaaaggcacagacagtaccaaaacatgggtcaggatgatctgtcctgttggcatgacaaatatggctcacaatttttttaaaaaaaaaattagaagactcaagtcttttgactttactgagaagatgaagtctgacactgtttatttccaatcttcttggaaagactttcaccactgtttatctcataaaattggagtgctatttaccagttaataagaaaatggcataacataaaacctttaaatactaatgttaaaagagaacttcagagttttctagttcaaccacctagcaaactcatgaagctcttccttaaattcttcaagttgattatccaaattcagagttaacactcagtagattgcttctgttgtaaggtactaacaataaaaacattcttcatgatacagacattaaatctacatccctgtaaaattcataagcagattctagccccgccctttgtagcaccatagagcagggcccctgtctctactgcatgaatacagagtattcgtaactgcattcaagggtgtgaaccaattgcagccagggccatgttttgactatctcagcatacctagatcacagtacagggaacatagctggtgttcaataaaagctttgaatatgcgagtatatatcacctttaatagtttcttctctgttttttctttttcctgatttcagacatccacattccaccctgggccttgcccgtctggtgagcccaatctctgctggtcagtcacgcagttgaggtcagggaaggtatgttgggatgggctgacatgaggggtaatgagggtcaagatgaaagttaaggctagggacattcttttgtgtgtgcatagtttaaaagacaaatcagtcattttgcatgttgatatctataaatgaccacatcaacatatctgctttaaagtggccgtgtcccagtggcttcttctaccactgtcacttttgaaggagggtcctgttccactccttcatcactatagtgacctctattaaacaaaagaggtaccaggaatcaaacattacatttcagatgtgaaatatctcccaataaaccagcattcactacttccactgggaattctctgtggctagaaaactatttttgttgaatctttgccttgattttctgggaaagatatatttttaaccccattcaccttcctccctccctttctccttgcccgtttttgctagccctctgagcttgacattgataactgtttagtataatcagttgcctaaatttccctgcttgtgagtttctccaatccctagagctgagggcatttgattccacacgcacgtccttctgctctgggccgtgggatgggtcattcctagaactcctaagtgagtggctctaaaactcatctcaggtgacttagcgagcatttcttgcagtgagttctgctctgaacctgtgctccagtcctagtgactgagtgttgtcttttcctgagttcaggtccaaatagccaccatcactctgattccatgtccaacagttccttttattattaaggcttaaaactttagtaataaaatgagataaatttctcatggctttttttccccaacatgtattatcctgtgaccctgaataaatatcccaaactagttaagattcaattctttatctttaaaaaggggataatattgatcccttgttctcagggtaactgggagaattaaacatatttcatgggcataaaatgcctggcatgtaagaagtgtttctctctggctgataattgttatctgattatcctctctcagtttggaggtcctaaaccccagctccatatctggatctgttacttttttttgccatacctatttgatgcagacttcttagctacataaatatctacatactgcctattatcccttttcctaacttccccaacactgggttttcccctctttctcttccccctgttctctcactgggggcctgttaagctgattaaataagccctgcccctctttactccctgttccagcagctcaactgaatttccgtcctttcacagtcatagctggatgcgtcccaagaacagaaaatgccacactccagtgggcaatcctaaactcttggctttcgaccttagaagtctggccactacattgcctttgaatccacatgtgtcagatctaataatacttagttgaagatttactatcttctccctaaataactgctccctgccactgggatgatcctctcagctcccagccccacaatctgctagcatggagctgtgaaagctgtattccatcagcaaggatctcccaaggctaaaagacccagaaacctggccatctgcacctacaatgtcaggagatataccctcttcaaaggggaaggcactgcttctacttaaacagttctccattgtgatgacaatacatactttaatcctgtaaagtttctccagacacgaagatggaaatgtgcttttctgcttcccagtctcaggcattcttttatctctaatttgacatgacaaacagactctccatcgtcacctgttatggtgtgaatgtctcttcatttcattaatgcagggctgccactgacataaagggtttttttgttttgggtcactcttctgtacccctatccttcccatatctaataatcaccattattatattaaaaggcaaatgttctgatcacagcttgatagtgtccttgaagtgaacaggacgattttctgtctacccagtgaaaacagcctttggtccttcacagtgatttcacagacaacctagagcctacgaggagactggaatgttgatctctctcaggtcaggaaccagacttacacacctacacacttcgtgcgcgcacacacacacacacacacaaactcatttccggcatccagtctttatgatgagagctagttcttcagtaagagtccagcttctggctgcagaaggaattaatgccaagataatcctgtgtactttggatccacgcagtaggaagcttcatgcttgctgctttcctcaggatgccctgtgacatcacccacactggattgtttttccttttgtgttaaaacactttggcttcattccaaagggtgtctgaagacaacaagccttccctccagtctacccactggccacgtaatcccacaactggaaacattcttctgcatgaaaaggcatcactcaattagctctcactcagagcacccctcccatgtctcagcttcctttgacctctttccttgccgatgttttagattcttaatggtttggtctggtggaggtctgctacagtcacttgatacttgtacttgtgtcccccagtgtgtatatcaagggctgatattataaggagagtgagtagatgcatctcaggaaaaattaaaaatcacttcagatgctgaaatagttcactacaaccctggtgtctggagttgcagggaataggatataatctcctcaattctagaaaacatggttcaagctgtatacaaaagatatacacatctgagggtatgagtgtgacattaaccattatgcaccactcacaccagttacagagatctgggttgcaatgctagtttttttgcttagcttgttaatttgcaaaacacaaaagatataatttgcaaaacacaaaagatataatacaacctgcttttcaagatggctattaggattatgggagagtgacacagcactgagccccaaaaagaggagatggagctgggctaaggggaacgtgtcactaaaagcagaagtggggagcacacagaaaaaccttgattagcatcatagattgtctgcgggctggaccttcaaagttgtaccacgctgaatacttggttgcactattagacttcctggccattactgcttggatagctgagattttgattagtgctgttctattaaactggtagtaaaatatctttggggaaaggaatggggtacatatgctcgcagacaggcaaggtcactgatatggtttggctgtgtccccacccaaatctcatcttcagttgtagctcccataattcccatgtgtgtgggagggaccagatgggagataattgaatcatggggtagtttcccccatactgttcccatggtagtaagtctcacgagagctgatggttttataaggggaaaccccttttgcttggctctcattctctcttgctgctgccaagtaagaagtgcctttagccttccaccatgattatgagacctccccagccacgtggaactgtgagcccattaaacctctttttctgtatataaattacccagtctcaggtatgtctttatcagcagtgtgaaaactaactaatacggtcaccaatctcaatgtgttgctttcatacaaagaacattctttgattcaaatgagaagaatatacatcagagtggtcctgctcaggagaggaagtggagaccccctttgcttgatggcacagcatagatgatgtgttgccacactcaggtgcccctgggaccaagaacccgagaaccaagtatgagtcctggagggctaggggttgatgggcagggccttgcactccttttggttttcacaaggttttagcgacatttggccaaatatgaataacaggacaaatattccttcagcctattatgtcttctctcgtaaatgtttctggataagggagctggcatgggcatattcacaagttgttgacaatctgtctttgaggactggtttctaattttttttttttttaatgagggcatccagtctatgtttctaggggaaaattacatgagatttgggagttcaaatgccaatgatgtttataattctcagctaaaatgccagtatttctttcccttgtcttgaactctatgaatgaaaaaaaaaaatagtgttggtttatagtataatccttccagttatgttttaaagttctgcagtactcccaaacccatcagttgaatgatcttttcataaatattatctatcatttatgtgtacaaaatggcattttgattaagttaaagcaaaaggtaattttattaccagagaaaatattcatctcatccctgtccccttctctaatcaacctcaaataaaacaagaccatgtggtctacagttaaaattgttataaataatatttaattaaatcagtatctaaaattattgatttttaaatacatattggaaatctttctccatgtagccataccatacacattcttggctaagaaataattttgttctggatgcaggaaacctacttgttcaatgcaagcaccactcaaattttcataggcagattatctgccggatgaattagcccaaggaattaaaattaaaattcctaaacttccttctgctcaacaacccagaatgttttccttggttacatctttctcatctgatagcttgatttcaagggaacaaaaaatcagttttaatggggcattcttttcaaagcaaataatttattccaagtcaaatgcaaattgatttctcactattttccttttatggcttatctatggcaccaacttccttcattcgcctagaaaatcaagaagtaaccacccaagccaaataccagggaagcatctttgttccttaaatgctgggaaaagtcttaaccctagtcacctttcttttggatctagcagcgtctttctcactttgatattattccaccatagaagtctatattctcaaagagctgtactgacagcagggctgtggtttacttggcaagactgaacttctcaagggcagtgatactgctcataattcttaatcatagtcttcacaatacttcagatatagttgaatgttgattgaatttaaaaatacacaaagatgtgtccatagttttttccagtcccttactgtcattggtgtatttggctgaatggtacagaaactcttcccgtgaaggtttaaacaccttaccatcatggtttcagggaaaagtgctcccatcttccccaaactcagttcttagttgcccatcaacatgaatattccagactgagaaatactgggaaagtatcacttttctttttaaggaaaatattactaacttgggttgccgctgtgtgtgtagacattcatagataataaaattccaaccttccaaatcaggacaggatgattcgttattcttctatagcactatcatggagataaaaagtgtgattggaagagaaagtattaaaaaaaacatggaaattcaagattctatcaaatacactaactcctgtcagctctctaaatcttctattatctgtagtaagtggtaatgcttccctgctaagaggccttgagaaggcacacactaatagaaagttaatctcatgtgacaagcaacatatagcttaaggtattgtctcaagatgctatctatctggatcttcctaggaagatcttttgtcttatattttaaggccttcttaatttatctatatccacagggaaaatgggaattgagacatcagccaataacacttactttattttcctttccaataaagatgtcctgaattttcattgcaacagcttaaaacagaaacccaatcacttaaaggtcaaagaagttgtagacactatccagggagtttctggtctacgagtaaatcacatctgtgagttcagtgattcccagcagattgaatagactaataaatagactctctgtaaattgccaaagaggacagtttgcaggcagtactcacaaatgggaaaatagcaacagagagacaggagttggatttctgttggcataccgtaaatgccaaattttgagaaggtcaaaagtcatgacacatatgccttccacaaattacatttgttttgaaatgcacagttaggttcaaccaaagcagctcccatacaaaactacatgggagctactaaagattagtcataggtaacctggcattcagaaacaccatggagagtgttatcattctgttgagaaacacaaagcaggtaactagtacaaaatgacttctattcttagcaatacttgtagttcctctgggcagttctatcatgtctccttgaaggtaatgaaggtcaaggcaattagatgctaaaacagaattctgaaacaagtctgggaaattgccaattttataattaatggcgggggaaaaaaatgccagttaactctctccccatttgggtctacacttgaaagatgatattaatctacataagataattccactttccattcgttatttggtttggctaagactgtagtcatagctacatgcactgtgattaaaaactaaacaataccacctagtatgaaaggaggtttagaaacacagcttctttttatcctcatagcaatccactgatgtgcattttcagatgggcaaacagaggctcaaagacgtcgattagttggtgcaaacgtgcacagtcttactagcaatcaagcaggtacttaaacttaaatccttatgtatcagaatctaggtctcaatttttgaaacttaaggtctcaatcttcaaaatgcataagaatcaattgaggaccaatcaaatcaggattggggtgaaactcaagaatctacaagtgcaagatgttctcttagaatctgaaagaaaatagttgactacactttaaaaaacaccactatactatactgcttgtagggatatctacatgaggtgttggaggttatgaatatgtagcttgaggttatgcctaaatagctggggacagctatttaggcaaacctgcatcatgaatacataattgccctcctcagaactcattcatttaaaggaccatttacttgagttttgtacatctagcaatagagacctcaaagtaggaaagttgcagaatagcacaatttttaacattttctttccaaagttattgaaaatattaagataaaagaaagattgttaaaacagacattgttacacaagccaagaaataaaggtattaacagtttaatatggtttggaatgggaaagagacaaaaggaggcaccaaaaaggggaaatgcatttggtgcccatttaatgctaactctgcttcatccctgatttgttacccactgttttcatgatttctccaattgctctccagtggccaaatgtgatctgactccctcttctccctcccacctccttgttttaaatgagatctggttttacttagatgaattaaatgtcactatatttgtttttgtaaattgttccagcaaaaattacagcatcgatggctgactttaaatgtctgtacgactgtctgccttgctgggctatttatagctgccttttaaaaagtctaataaatgcttttagattgctattgatttgtttcccctttacaaagcctcagaattaatattcttcaaagtattaactgaaaacaccttttttctttctgcaaaagtcatgcatgtttactgttaaattttagagaatataagtatgtgaatagaagaaaaaagggaaaactaatcacatcaaaattaacattttgttgtatatgattctgttttttctccatttttaaatatatttaaacttaaaaaattttattgtatgagagtttttatagccctgtttttactttcatttaaaaggcccacatttttttcccgtcactcttctactccattacttttaatggctatagagtaatcatatgattgtaccattacctatgaaatcaacctctcatttataaaatagctaattcacatccagattttgtcactacaaatagccctccaatgtagtcgtgtctttgtattcatccgtaataatttctttagaaaaaaattgctgagaacggaattgctgcattggaggttgtaccagattcatagactattgtcacacatagctagcttacctccagaaatagttcaaattaaatgtatacatttgaatatatctttaaagtgacaatataataacacattaatattgggggagtcacatttctagtaattcaattatagccttaacaaatttaattaaacacttttacacaaacagacacttttcaaaagaagacatacaagcagtcaacaaacatgaaaaaatgctcactatcactaagcatcagagaaacgcaaatctaaaccacaatgagataccatctcacaccagtgagaatagccattattaataactttaaaaacaacagatgttagcgaggctgcggagaaaagggagtgcttatacagtgttggtgggaatgtaaattagttcagccaccgtggaaagcagtttggagatttctcaaagaacttaaaacagaactactattcaaaccaacaatcctgttactgggtatatattcaaaagaaaacaaatcattcaccaaaagtctcatgcactcacatgttgataaaggcaccattcacaatagcaaaggcatagaatcaacctaagtgcccatcaatggtggactggataaagaaaatgtggtcaatatacactatggaatactacacagccataaaaaagaacaaaataatgtcctttgcagcaacatttacgtagctgaaggccattatcctaagtgaattaacacaggagcagaaaaccaaatactgcatgttctcacttaaaagtggaagctaaacattggatactcatgaacataaacatggcaacaacagacaccgaggactactagaagggagagcgggcagggcttcaaggtttggaaaactaacctcagcatcacaccaaacctcagcatcacacaatatacctgaaccaaacctcagcatcacacaatatacctgaataacaaacttcgacatggaccccagaatttaaaagctgaaaaaataataataatataaaatttcatactgaactccgttatcagtcctgaggaagacgataacataaaaacaagtagtatcacctttgtgttttctgtttataagctggtatctgcaacagggagatgtaggataaatgggtgtttggagaactgtcaacactgatgtttttatagtcttaggagtactaactctcttatgagtgatgaaatttccttgaggataaatatcatctttgtattattcaattatttattcatctatttcttcaaaatataattagtaagtgcctatatatcacatattgctttagctgttagggatacagtggtaaataagacaagcatggccctcgtggagcttacaatttatttcacagaacaatctaatcaacaaaaaagttaatcagtagcagaaacatccttgggctttagagcagggtgtggcaaactcttctgtaaagactcaaagaaactaggataatatttaaggtagtaaatattttaagctttgtggaccacatggcctctgatgcagctactcaactttgtaagtttgtgtgatgtaggggagggaagactttccctctagcctcaagttcagtaattcagtagaacttatgattgttcagaacttgagtctataaaataagctgacaagaggcagattttatcagtccattcttacattgctataaatatctgagactgggtaatttaaaacctaggtgatttaaacctgttttaaagaaaacaataacacagggacacagagaggggaacatcacacactggggcctgtcgggggttcgggggctagggaagggatagcattaggagaaatacctaatgtagattacgggttcatgggtgcagcaaaccaccatggcacatatatacctatgtaacaaacctgcatgttctgcacatgtatccaagaacttaatgtatcatttaaaaaaagaaaaataaataaataaacaaataaatgctgaaaaaaaagaaaagatgtttaattgggtcatagttctgcaggttctccaggaagcataatgccagcacctgcttctggggaggcctcaggaaacttacaaaatggtggaaagtgaagggggagcaggcacatcacatggtgaaagcaggagcaagtgagagagagaattgaggagggaggtgccaccatttttaaatgactagatctcataaaaactcacaatcgtaaagacagcaccaagccatgagagatgcgcccccatgatgaaaacacaaaacacctcccaccaggtccccctccagcactggggaatacatttcaacatgagatttgggtggggacaaatacccaaactatattattctgccctggaccaccccaaattttatgtccttctcccattgcaaaatacaatcattccttcccccaaattcccaaaagtcttaacttattctagcattaactcaaaagtctgaagtcttatctgagacaaggcaaatcccttccacctatgacaggttagttacttccaagatacaataggggcattgtacaaacaggcgttggataaacattcccattccaaaaggaagaaattagtcaaaataaaagctctacaggccccacacaagtttaaaacttagcagggcagtcataaaatcttaatgctccaaaataatctcctttgactccatggcccacatccagagcacgctggtgcaaggggttaggttcacaaggccttgggcagttccacgtctgtggctttacagggtttagtccctgagactgctgtcacaggttgttgaatgcatgtagcttttccatgtgcaaggtagaagttgctggtggatctactcttctggtgtctggaggatggtgaccctttgtcacatctccactaggcagtgccccagtggggactgtgtaggtgggctcccacccatgtttcccctctgcccttccctagtagaggttctctgtggaggctccacccctgcagcaggcttctgtctgggcacccaagctttcccatacagcctctgaaatcaagtaagaggctaccaagcctcataactcttgcattccatggacctgcaggcttaacaccacatagaagtcaccgaggattatggcttgcactctctgaagcagcaactcaagcaagctgtgtctggggccctttgagctaaggctggagctggagtgacctggatgcagggagcagtgtcccaagtctgcacaaagcaacagggccctaggccctgcccacaaaaccactattttctcctagacctttgggcctgtgatgggaggggttttctagaagatttctaaaattcctttgaggccttttcccattgtgctggatattagcacttggctcccttttagttatgcacatatctctagcaagtggttgctccacagcctgcttgaatttggctccccaaaaagcctttccttttttgccatgtggccaggctgcaaattttccaaacttttacactctgcttcccttttaaatataagttccaaatttaggtcatttctttgctcttgcctctgaacataggcagttagaagcagccctggtatatcttgaacaatttgctgcttagaaatttcttctaccagatacctaaattatcactatgaagttcacacttccacagatccctagggcagaggcacaatgcagccaagttcatgcatgagtcacctttgctccagttcccaataagttcctcatttccatctgagaccgtgtcagcctggacttcattttctgtatcactattggcattttagtcacaaccatgtaacactaagcaattccaaactttccctcatctttctgtcttcttctgagtcctccaaactcttccaccctctgtctgtcattcagtttcaaagccactttcgcattttcacgtgtctttgtagcaatgccccactctcagtaccaattttctatattaggttctttttgcattgctataaatacctgagactgggtaatttataaagaaaagaagtttaattggctcacggttatgcagactggacagtaagcatagtgcccgcttctgcttctggggttgcctcagaaagtttacaatcatggagaaaggtgaagggagagcaagcactccacatggtgaaagcagaagtaagcaaaagagagagagaagtgtctggggggaaagagagatgccacacacttttatatgaccagaccttgcaagaactggtcgtggtcatgaagacagcaccaagccatgagagatctgtctgcatgatccaaaccacctggccccacggcaaccccaccttcagcattagggattacaactcaacatgagatttgggcagggatagatatccaaactgtatcacagattaacaggagaaagtgtatatgcatttatcaagtgcattttcttttataggaaagaaaagtgaatactcaagaaaccagttagacttaaaagcttattaccccctctttataagggagaagagagtggggatgcagacaagttagggggtataaatgatttgggggaaagatgatggggtccatagaagaagaggtgacagtctgtgacaaagtttgtctgggtgtggcatgaacttccacttaccccttctgggatatgagttaatctctggttgataaaactggaggatggcaggggtatcaatgacaattaagaagttctttttggaggatctgtccctaggcagataagaggatcccagagaaagactctgcctgcatctgttgtcccacagaaactccagtttaatgtaatcagctaccaaagtggcatattttggggtggcatttcctgaacattttcaggaacaatatgtagccgcagaccttaaacaatggtctggctgtattccaataaaacttcatttacagaaacaactcaatactcagatttggccctcaggctgcagttttctgaccccagtgtttgttagtgaaaaaggaagatacggtgaagatctctacctatcacagaacggtgagaagagtagtaggaaatactttagagagagggccagatgttagatgtatcaatctgcttaccatacagattatgcaaattattctaattgcaatggaaagaaactggagagttttaagcaaagagtgacatgttttggctttgttttaaaagagggctgcgtgtagtgggtcacacctgtaatccgagcactttgggaggctgaggccagcagatcacttgaggccatgagttcaagaccagcttggccaacatagtgaaacccctagtgaacattttgctgcttagacatttctctactgaaaaaaaaaatacaaaaaattagctgagtgtggtggcacatgcctgttgtcccagctacgaggttgaggtatgagaattccttgaatctgttaggcagaggttgcagtgtgccaaaattatgccactgcactccagcctgggcaacagagcaagactctgtctcaaaagaaaagaatagaaaatagactgacgtgtaggaagggcaaaaataggagacctcttaggaagttgttgccatggcctactgaagacagtggttttgacaacagtgagaattgagtagatttaatatctacttagaagtgaactaaagggcttgctggtagttgacatgatgatttaagggagagtcatgagaccatatgcttgcatatcggatacttttttttttttttgagaaggagtcttgctgtgttacccaggctggagtgcagtagcactatctcggctcactgcaagctccacctcgcaggttcacaccattctcctgcctcagtctcccaagtagctgggattacaggcacccgccaccacgcccagctaattttttttactttttttagtagagatgtggtttcaccatgttggccaggctggtctcgtactcctgacctcagatgatccacccaccttggcctcccaaagtgctggaattacaggcgtgagtcaccacgcctggccagaatactttttaaaaaggtacatgtaattaaattttcactgatttttgttgttgatattgttcaagcaacagaaattatccctggttaacaccagcagaagaaaacattattggaaagataacagtttggcttatagcatcaaatataagaagatacaatctgatttgagcagaaacaagaggaaaggcaaaataacaatcctgtctcagagactgcctcgtagggagctgtgacttgcctctctctttcaacacctagatgtacaccacctcaccactggcctcttgactgcctgccattcccttaaataacaggagtcagtaactctgcgtcgcttcctcaagattcagcctagttcgtgaagttctgattggccactcctagatcatgtggccctgccgcacatgaagggtgagaaagcactgtaatgagaggtggcttctgataccttctctggcctcatcctaatcccagtcatgatcatctcttacctcattgttgaaacagctttctggtttacctccctccttctgctcttaaatttcccccaactgattttccaatggacagccggcatgatcttgttcaaatgcaaaagttatcatgcaatgcccttggttcagatatttcaacagctttcactgttcttgggagaaatatccaaatctttacctacgagatattctatgctctggctctctctttctagcctcaattctccctcatttcaacccatgcccacactcaggtctttggaaagcatgtcctatgcacctttgaaaagatattgaaaagataacagtttagcttatagcatcaaatataagaagatagaatctgatttgagcagaaacgagaggcaagaaacctttgcatgagtcatgcagcctttgcaaatattgttttctctgcctgggaaacatttttgcttcctcttcttattgagttaattcctcttcctctttcagattatagcttggacatatatctctcccagactagataaggccctgtatgataagctatcagaggagagagatttattgaagttaagggataaggatgactataaataaaagagagcttcccaggtgctagctattatgcgctttcattttatgtcatttattcctcataaaaacattttgagacaaattgactattgtccccatgatttcaataaatacaatgaggcttacagatgctgattccatgcagctaagatgtggcaaaaaaaaaaattataataatgagaatccaagtctttgatcttcatattcctgccctttgactattctgctgttagaccacattctggagcttggactgtaaccacggtagcagaaggagagatacttacatttcaggtttagaaatgattgctctggatgaaagaggcaataaatgagttgaaaggctgttatgtaaaccaggtgaagccaggtgagagatcaggaaagcctgcattcaatgataaaatgcagatgcgttcctgtaatgataacttcttatggaaaccaggtcttaaaattagcttagaaagagggaggctgcagccaaatcacacctatcaatagtgctctcacttaacaaccagatagtgactgtacctcaaacaaacaaaataagatagggagcaaggtctgagttgagagcattttaacctaaggctcggaatgaagagctcactctgaacttgaatgtcaggccctaggccaaaccttcttggatggccctggttcaatagtaacctccctccttgctccaggcccttctccatagtatcactttcttttgtgtcctccatgatagttactgctatcagagattgttcctttgtatggttttcatgtttgttgatacccgcctctccaatgtaaactgcaattctgttttccggtgcctaaaagtggatgggtctgtcacatagtaggaactcattttttaaaaaaaaactgaatgaaaagaaaacaagaatgaaaataattagtagcaactactcccaaggggaatgtagaggctgttgggggaagtggtttccttatacaatgaaaggaggctgagctgtggtcttttacaggaacatcagatctcgtgttatctgacttctttgccaacccagatccagctcaaggtaaaaatctaagcaacttgggctaacatccaaccaagacagggatgggcagactgattttcaagataagaataagagaaagtttcagaaccgtcttagtaaaacatgtacacacaatttaagacaaagaataagcatgataatcaccttgtggatttctttagcctgttaactttgctaatcttgtcagtcctgtctcctttaggctcgttcctaaagtaatacatagcaaaggagtaagcagtgataaaatttttaaactgagttgaatagatgggtgtgtgtttgtgtgtgtgtgttcagatatgggtgttgacaacaaggagcaggggatctcccatgtagtgatggttgtaaaaagaaaggaaagttggctgggcacagtggctcacatctgtaatccaacactttgggaggccgaggctggaggattgcttgaggtcaggagttcaagaccagcctgggcaacacagcgggaccctatctctaaaaataaataaaaaattagccagccatagtggcacacatctacagtcccagctacttacttgggaggctgaggtgggaagatggcttcagctcatgagatcaaggctgcagtgagctcggatcatgccactgcactccagcttaggtgacagagcaagatcctgtttcaaagaaaaaaaaaaaaaggagaggaaagaaataaaagtcaccttgtccctggggctttgaggaactagtgaaaggacagaaaagtggcccaggttgctttgtggtaggaaacagtggcactattcctgagcttagatagaaatatatactgggaaccacaggctctctgccagtgtcctgccagtggagcaccctttgagagagtgaaagcaagtgttctgatattctacagaggatgaaactcagttctcatggtgttactggaaaaggctcctggtccagaccccaagtgagggttcttggatcttgcgcaagaaagaattcggggccagtccacagagtaaagtgaaaaaaagttaattaagaaaacaaaggaatgggccaggtgccgtggctcacgcctgtaatcccagcactttgggaggccaaggagggtggatcacgaggtcaagagatcgagaccatcctggccaacatggtgaaaccccatctctactaaaaatacaaaagaaattagctgggcgtgctggcaggcacttgtagtctcagctactcgggaggctgaggcaggagaattgcttgaacccgggaggtagaggttgcagtgagccgagatcgcaccactgtgctccagcctggaggcagagcaagtttccgtctcaaaaaaaaaaagaaaaatagaaaacagaggaatgaaagaataaagaatagctactctatagacggggcagagcattcccaaaagcaagaggaggaacatgcccaccttgggtgcaatgcttttatatatataagataacaaagcaaaaaaatcatgggggagatgtgctttactacaagagcttttgacaaataattgttaattcttgtgtaactacagtcttctgcaagaatttatattattatctttaaagtgaaactgattcttagtttaagaatgcttttgttcttaagatatcaggacatcaggacatttcctgggtctgttaggtcgtaggtctgttcagtaaacacgattaacttattctcttaactgtaaatatcctgttaactaagaatgcctaacctcctggggaataaaacccagcaggtctgagcttcattttacccagctcctactccaagatggagtccccctggtttgaatgcctttgacaatggggttcagattcaaacaataattattgaatgactcttgtgtgcctggcacattaaaaggtggcttcccattcattatctcattcaaacttcacagtactttggtgacataggtatcataaccttatttcatgaattagtaccatgaggctcagagaaaagttatttccacaagatgcccaggaagttgagggcagacctggaactggggtccgcctcctgattcgggccctctctgcaataccgaaaaccattttattttagactatttattagattggtgcaaaatcattgtgattttaagttttgcaccaacctaatattaagggaatttgatttctaaactcggtaacttaaaattataatttatattgttttggtgcaatcctgacatccagaaccatggagaaacgtaatcccagattctacatttcttctacttctttataaaacagcatttggggagaggtaggatttataatcagatgtagatactacttaaggaaaaactgggctagaaacaggatctccagataacgttactagtgatgctgatacactggatttcttcccagctccagctttcatttagttgtttgctcataacatattataacccctttctatagtaaactggcacaaggttttcttaaattgattcaggaggataaattgtaaagttatatcaggagaggggtaaaatccacattcaccaaaatggaggattagggttaggggttagagctgagagggagaagagatcagaaagggaagaaaaggtgtaggacaccctgctctggggatgagaagggaagctgagaatgccattgacttgtcaccaaaggagaaactgaagttagagagtcagggagtatttggagaagcgtggacagttatctagtaggttctgggtaaagcaagagttcagtggccgaatgaagagctccacctaagcgggtctgaatgtcttaggaggattccaggcctcaggctcctgcataattctacggcaagggcaagaagttgtaaaacaggtttttgagcaaaatagccacatagactaatttggcctggcattgtcctaactcttaatacctctctctctctgctcctcagcacccaaagcccacccatatgtaccaaccaactgcaccttcctctaccggcctactcttcatctaccctgggtcccatcctcccgtctcctcctcctcctccctcagagctccacctaagcctgtcttcaaaggcaatgacctgcatacagaattaggccatctcttctactctccaccccatcagctctcaaatttccaccaaaacttatctcatcttatagttgtcaggaaagcaacttgaataatgatgacttcatgtgttaactacctcaggtcctttacatggtaaagaaggcactcattacctcaaacaccacagacattcagaattgtgttttctgaagaaattttagaccttttttgtggtgcatctcaaagtatacaaagcacacacttcatattaacatatcatgttaagtagatgctagaggaaagatccagttttatcaccagtgtcttaaccactgtgttgtaccctcggcatgagcttacctttgaagagcaatctacaagaggagtttacctggtaagtcgctgaatttgagaggaggtggcaaaatggcagaggaattgcttcaaaatggatgagtctgattgagacgcttttgtatactggaaacggggacaaataagcaggatgtgcatttgttatgttgagaatgttccttgctgtgtttatagcttatttgaaatgtactaaattattaaaagtttctccttaaatacaaagatttagaaagctgaggcctaaaagtagatcctactggtcacagtagattaagaaatgtttctgtatctgagcttaagacaatgagtaagatacgagaaaagtggttatcagggttggggttactgacccttctaacttcccctctctcagacctcctcgtgggatgaagtaaatcagggagtctctcgctgctttcctcagtgtctgtgggtatttaataaacgttgatggaaacgcttcaccaacctgagtgcattgcctctcttctctagcctcatctataaaagaactctaagtcatttctaagccaagaaacggctgtgcttttactacctttgtcattattatatgtcagaatagaccttacctgattcagcgttttccttcgaacttcatattctacagctttgtaatgatagttgatagtaattttcatttgcaataaaaaaataaaagtttaaaccaatgaaatagctgcaagcctgctgtatcggttcgaaccccaagagcgcggtaacaaacaccacaaggcggtgtggagcaacacgctgttctaatgagcgcctgggtacagacgggctgaggtctacaatggcgtcagcaccaaatgagtatgcggcaggggtttataaagtctcctgtaaacaggaagtgtctcagtctgatgtaactgctacgcagtacgcggacggcctctctttccgtcttcagcgggtacgtgtcttccgggcagccctcttcctgcttctgctatcttgctgacgcaggctgctgactcaagtggtcttgagccttgggactgggcctgagaagggaggagttattcaccctccaccccgcagcttccaggcccagtggaaagtctttcaatagccaccatcagtttctacggagcaacatgtaaaaaattacaaaagtaggaacattgcaaatgctttctcatggcggaattaatggcgacaagaaaattacgaaagcatcgaagcacttttaaggctgagttttaatcctaagaaacacaaatgctaaatataaaattccagtcaatcaacaagtgctagcctcgattatttaatggtaaacagttgggaaaaagctcaaattaacacgaaatactaaataagagactaataaatatttcatctagttagtgtgacaaaaaggcctccataaacttctttgctcattgggtaggctgagaaatgggtcagattggatatggtttatttggttacaattgatcatttggcctaaagacaactgtcttttaaaaaatgcgttatttatatcgttggagagtcaagaaaaggatgagtgtatagacctaaacagaatctgaatgcttgcctttggctaagttgaagttaatgatcacaataatgaaccacatcaggaaacatggtgagcttggggccgaattttcagttgtaacttgtacctctcaaattgttacattattcaacaatacattttccacacactcaaatttgttcacttgtaacttgtattaattgaaaattcattcactttggaaggtgttttgaaagaggcttgtgtatagcagttgctggtacccctggaattcaaaatgatgccaactgaatgccatttcaaataaaacctttcatttatttatttatttatttatttatttatttatttatttatttattttttggcagaagaaaagagcagagtcacacagtagctctcgatttatgaacagtgttttctaactctcagactcccaccgtgtgtgtagttcccttgaaggaactaggttggacacatttaacaagaaaataattgtatctctatatctgctttttaatttgaaatcatatggacctttgattatacttcatcccattctcatgcctcctatgaccagttgagagggtggacactgagaatcctacagcagcttcttctgtttgtaaaatattgttcaatgacaagtcagacagatagaaacctccaaagcatggtggctattgtggacaaaatttgtgaaaatattttacattggaccttccagtaagcattttcgcagccctaggtcacatcttgaaattatacaattggatccccccaaattgggttgaagtgctgacaaacgagaggatgtaacagatcaaaactgatctggatgatgggtgagtgaagtgcaggcagatagaggacagagataaacccatacatgccttacgggagtttgtggctttaagtggagtccatccttgtaagtggtgcattaaacaaagagtttattgtaaagtgggcctgatccctggaggaaaagaaaattgattctttttcactggagggaagttaactctttctgtccttttgcagcagagaaggtgctgaacacatatttagtgatgaatttccctggttagttccaaggggtctttatgtcaggaatagtatttattcatactgcattttctatgtaatagagaggcaggattccctaaagtcccccgttataatcccttcatcccatctagcacaggtagactgtgaaaaacacatattctaatagttactaagctgttaaaattggctacaatacttttatttttgtttgttttgcacaggagtaactcaagatgattttgatgttgcagttttaaatttcactttgacttgagctgggaaatcctttggcctattataccatggatgctaaaaatggtaagagctgcatgttctgccttgatgttttcaagactgaatttggagggagaaaaattattttgcctaaggatgtccgtgaaagtatcaggaaaacactgaaaagccggagagaagggttcaattgtagcgtgctccctttaagagggaaacgagattagcaactttggcaaatttttgggactctattcagagggaaagagaagagctgccagtgtcaaaaaaaaaaaaaaagaaagaaagaaaagaaaaaaaaaaggatgaatgttatgagacaaagacagaggcaattttacacctttctgaaagcttacctgggagtagttttaggtccactgaggttaagaaagatgcatttttttttcttttctttcaagactaaaggtggagttagggggaaatgagtttaatgtgaagtagtactcctgtcagttctgtttgtcctgggaagtatacaaggaagaaaagcctccgtggaagagagagcaagcaccaggtgctgaaggtgagggattacctattacactaacaattatgaaagttacattatgatatgaaagtagaaactctttattgcatccttcttttaaggaaaaacctgatttaaacagttaggaagcttatgactgctagacacatatctgaattgaattttgccttttcatattagcaattactttgttttctaaatgccctcatgcaagaatagtttacaaaaataaagcagatttttttttatatcaggtcagaaaagttagtgaggcatcatttgggataatcacagtgtttacccaagccttattcatatataaaaatgttattttctctaattgcatattttgcctctataatgactggttaaattctaaactgaaatgagtaatcaatactgtgcacctaatgttcagatgaagtcgtagctattttagatggtatgacactgctccaaatttggcaaattgctataaagatggacattgaaagctaaaaagtgtgtttttgttgttgttgttttttaggttctaactgaaaacccaaaccaagaaatagcaacaagtctagaattcttactactacaaaactcacctggatccctaagggcacagcaaagaatgagctattacggcagcagctatcatattatcaatgcggacgcaaaatacccaggctacccgccagagcacattatagctgagaagagaagagcaagaagacgattacttcacaaagatggcagctgtaatgtctacttcaagcacatttttggagaatggggaagctatgtggttgacatcttcaccactcttgtggacaccaagtggcgccatatgtttgtgatattttctttatcttatattctctcgtggttgatatttggctctgtcttttggctcatagcctttcatcatggcgatctattaaatgatccagacatcacaccttgtgttgacaacgtccattctttcacaggggcctttttgttctccctagagacccaaaccaccataggatatggttatcgctgtgttactgaagaatgttctgtggccgtgctcatggtgatcctccagtccatcttaagttgcatcataaatacctttatcattggagctgccttggccaaaatggcaactgctcgaaagagagcccaaaccattcgtttcagctactttgcacttataggtatgagagatgggaagctttgcctcatgtggcgcattggtgattttcggccaaaccacgtggtagaaggaacagttagagcccaacttctccgctatacagaagacagtgaagggaggatgacgatggcatttaaagacctcaaattagtcaacgaccaaatcatcctggtcaccccggtaactattgtccatgaaattgaccatgagagccctctgtatgcccttgaccgcaaagcagtagccaaagataactttgagattttggtgacatttatctatactggtgattccactggaacatctcaccaatctagaagctcctatgttccccgagaaattctctggggccataggtttaatgatgtcttggaagttaagaggaagtattacaaagtgaactgcttacagtttgaaggaagtgtggaagtatatgcccccttttgcagtgccaagcaattggactggaaagaccagcagctccacatagaaaaagcaccaccagttcgagaatcctgcacgtcggacaccaaggcgagacgaaggtcatttagtgcagttgccattgtcagcagctgtgaaaaccctgaggagaccaccacttccgccacacatgaatatagggaaacaccttatcagaaagctctcctgactttaaacagaatctctgtagaatcccaaatgtagtcctaaattgcaattatgagggctaccactgaatcattttatctttcagccaatcaagtcgttgtaaacgtggcttttttgaaagtgttatggctatgttttatgatgatgctgggtaagtagagtaagttaaacttggtaaaagataatctaaaaattccatagttctcagttattaaaatttttcttgttcgccaattttgtattaagaatgctattaagcctaattgattaaaatttatcttttttattatcttacatgcttgtatcttcagttggaggtgtagtattcaaaaacggggaatgaaggcaggaaggaggctggaataaataaaaataaaaatagacaagtaagacagcataaataatacatttttaaacatgtcaacattgataatacaatgaagatttaccataaaaagtatcatatctaaccaagatatgcaaaagatgcattcagtaagctgtaacgttgagaaatgtaactgtgaaatcagctcaccagttcaagtcactaggtttgccacttggaccgtcttggtttcagcgagcatagcgagtggctgtaagaaattgtccatgccaccaattccactgctacttgcccaggtagtgatcagtgagagttagaagcaattttttctctaaccgatgaggcagaagaaaagttaacagtatttaaagcagcatttctctcttaacgttcctgggagactccaacaaatggagaccagaaacaaggcaaccacgaccttgctaggttctctgaggaggggactttctatgttcacgtcccaccttcttcgaggacatgaccaagggacaggatcatacagatgaggtgaggggatggttagcagcgataaacattctcagacccttggagagaaaccgttgctagcttgctggtcccgaaagattgcaactttggctgctacagaaaggatagaacctttttggggggagggtggggagggagatatttatttgtgcccagaagcagttatgtatgcttcttgtcttggttactgtacaagatacaaatgactcgagttgtggattgcaagaaactcttttattaaacttggaacaaccatttaaatgaaggattttgtgagatagaattcaattaaagcgatttgaatgcacagtaagtggataatctgagtacaatgaaatttcttaagttttagaacatgagataaagttgtatactctactttcatgttaaaatgttaatcatgattactttaagcccacatccactgagtaaagagtcactttaaactttataaatcaaagagatattaggaacattcagaattatttgtgttttgtttttgttttacattgttgctgcactggcaataagtatgtggcactgtttttatttgtttatgttatttaaatacacacccagacacacacacacacagtttttgctttttctggaaaatctttctttctcttctctctccatgaaaattaaaacacacaagtgaatgaagtaattacatagtccaagattagaaatacaagtaaaatatataggtataggtagatagagtgcctttctgtttcttttcttttcttttttctttttttgttcttccttcctttcttccctcctccccctcatccttccctttctccttcttttcccttttttttttttttttgacctgggagtaataaagttactttttaaatgcacgtatgcaatcttttattcctcttgttttatggataagagatttgttcaggtcaaaagttgcaaaactgttctgaagcttaatattagagacccaagtaagattgtttttagtcttgcttgaggaatgcacactccatttaaaaaattgtgcgctctgtagatttggattttacagcagcaattacttggctaaattagagtactgcaatcttgtaagtagaaaacagccaccatgacaataaacaaaaacacttaaaaatatttttagcttgttttacctacatctagtttcatttcatcttgctttgctttgttgactctgctaccgctgatgtttgccttgtcaatatcagaataggggcatcagtgtcccgtgaaatacattttgttgtgctatgagcctctgtaatcaaatgcttgtactcagaagagagtgtaaaatcagcatttctatgtaacatatatctctaattatctgtgtaattttataacatactttgacaaccccagtgagttacttaataataaagatcttaaaataatgcaaaaactgtgtgcatatacctatattttcagtggtataagttctctttgctgatgtggtcagaattgggtacagtgcaccaaaaataagaatgctgcttcatagaaagagaacataggcagcattgtaaagcatttttatgggttttttaacagcttgtacaacaggtatatctgaagtaaaaattagttgcttctgtaagtatcacaagcaggttctatgtaaaatggcaattctagtttcaaatgccctgccaataacgagaagttggttgaatattttttcttatgccatccactttttcccccaaaatgaaattattcaatgaagttaaatagatttaaaatgaattgtggcatcaaggtattgctctaccatgtgctatagtttctgaagggggccctggagaagtgagtaagactaaggagagagaagaaaatattattttcatgtgccaccagattagtgagtattatcaagtgattgatgcatggatttaatccccacaataacatagtaaggtggattttttaaatttccatttcatcgactctcccatcatcttcttttccctaacaaattcctaattggaaaacaatgtgttcgggtttataaaaaaaaaaaatacagctgtatttccagtcccgatgcaggttgctggagggtagggttaactggcatagttctggcacataagatgttagcaggaatctatgggtgcggcttttatgaaagcttttaagctgacttggctggctcatgccctgttcctctccctgctcacctttctctccatctggacctctaacttggtagcttatgctcttgaagccaccttgtaagaatgcaaatcaaggacaccccctacaagggaaaatagaaaggtaagaaagactgcagccctagattgcacatctccagacgtctttttcataagtgaaaataaatatgatttctaattgacacagcaatatatctaagggaaattatccaggaaacaagcctggtttaaaaaaaaaaaaaacgatgcacagcttaggtccaacttgtacttgtccatgacagttgatggagttgatcactgtggaaacagctagctttctttcttgcttttttctttctttctttcttttttttttttttttgagacagtcttgctctgttgcccaggctagagtgcagtgtcatgatctcagctcactgcaacctctgcctcctaggttcaagccattgtcctgcctcagcctccccagtagctgggattacaggcctgcaccacacccagctaatttttgtatttttagtagagacagcgtttcaccatgttggccaggctggtctcgaactcctgacctcatactttcaaaggagttgaggacatgccactatcgtaagacacacacacaaaggattgcttttggcctggaaatccctctgagatgctggtggtggagtgaccttgataaaaggattaaccaggcccactgctcttttgcttctttcttccccccaacataaaatccacagaaacctggataaagcaggcactgtacaacttgggcaaaaaataaaactgctaatactgtctcagaccctctatccctcaccaagaccaaacttcatccatttagaatatttgagaggatttttaatacacacaaaggaatccagatttttctttaaatatttgtatttcatcatttctgagtgggccaggacatgtgctgagtggattctctgggccacttttatgtaaatttttaggcaccagattctactcagtttaatatattctatctattagtctcatcagttacaagccttgattcttctgttctgaatgttctgtaaggcgtgtgcaaagtcctgtgtcttttaaggtaagacttgcctgtggatatctagaaaccacgcctattcaccctgcgtactctataaatcacaaagccctgactcaattctaaaatcagcgtggcctctctctctctctcactttcatttttaaaggagcagtatgacccaggctcccgagaagagagcttctggctccacatgcaaaatgcaagttagtgttaacacagaacacacagattatgcagcagggaagcacttggtaaattcctttcaaatgttcccctagataggaggtctttgaaagcaaaaactagtaaccgagattcagtccagataaatctgtgggcagacagcaagtgaggtcccctagaaggggcattttcctaaaaagacataatcataatgctgcccagaaaccatcattggtctgcattactttgtaccttttcttcaatcagaaaaaccttatctaccagtaaattcccaagtgttttctttcactgctcttggtttcctaaagcaactgaacgcactcctcttatgactatgcggttgggtcatgagatttggcttggagtaagcagcctcttgcctcatcctgccaccctgtgcttctttccttggaaatgtccaagcttgtggtttgggattctctgtgcagagttttgagacttatgtcgacacctctacatgttttgaaattcaatagattgagttgctgagcacctagcagggatggtagaaaaaacaaaaatagaatgaataaaataaactatggccttttcctgttgggtctcattgatttattctactttgtaaatattgtaacgtaaaaggataccatgtccagggtctgtctgctgtcccaagaaaaagcagctggactgagctggagagtcttccaaataaataagacaatctgtgctgggtaatcactcatctcaggcctggagtggaaactctggggacgcttcaggctgcagagaaacaggttaattatttaaagtatttcagcaagcctgatggatgaaaactcaaacaaatagattaagtcttgctaaattacatagccaaagaatgctggtttttgttttttttttttttttcctctatgctatcatttaccacaggggccaatgaaaggtctttaatcactgtctaagtaacctgaacttgagacagaaagggcccctggagatttagtcactgtgaaaacttctttacagcaagttatcagaaatcttcaactttccacataaaatacttcagtcacatgcgatactcactgtggttaaatgccctttatttgaattagaagcacatgttgaagatcaattatttattgtgctgctggttgattctttctgacactagttggcctggggaagggaggctagtcataggggccgggttaaggacagagctagcctctgctagccgccaattccagaaccaaagatttttaggatatcaggaggacatcagatccctttttatgtaggaggaaacctccaactcgggagttatctgcctaaagagtgacagacatggagggacggaagaagaaaacacaattaccaatggccaacctggggcaataagcagacctgatgctgcccaaagttgaagtattgctattttttaatcagtaaatagcgcaaatgatcatttcgagaccctttgttaaatagcaagctagtattttctagaagtgctattgatcattaagtatttaaagaagtggccgggcacggtggctcagcctgtaatcctagcactttgggaggctgaggcgggtggatgacctgaggtcaggagtttgagaccagcctggccaacgtggtgaaaccctgtctctactaaaaaatacaaaattagctggacgtggtggcacgcacctgtaattccagccacctgggaggctaaggcaggagaatcgctggaacccgggaagcggaggctgcagtgagccgagaccatgccgctgcactccggcctgggtgagactctgtctcaaaaggaaaaaaaaaaaaagtatttggagaagctgggaaaacaaaggtaaaaaaaaagaaatgtgggaggcagctggtaagagtcatgataaaggaagataaacttcttcaaaatgtgcacaaacaacgattgaataaaaaaaaaaaagctcacaccttttcagggaaatgctaatgtacagtgaggcacacctatgtacactgatttattgccaccaaaccttttaccttggaagcagaaatgtttagtcttttggcagggccggccttaaagcataagcaaacacaaggagcaacaggtttttttgggttttttttggttttgttttttttgggagcaacagggtttttttttgttgttgtttttgtttttatcattaaatggaagtgctcccttcttgaaacaagtgctatgaagaaaacagcccaacctgagagaatcacacagatttggtctggatacagccacttattaactgtgccacctggagcaactgagctgctgtctccaattctcagtttccttagctatagatttcctttctgtattaagctacaaatttaagggtgcagaattaagaatcaaatgccttaagtttgaattctagttcttcttctttcttttttaaaaaattaattattattattattattattttgagatggagtctcactctgtcacccagtctggagtgcagtggcatgatcttggctcactgcaacctccacctcccaggttcaagcaattctaccacttcagcctccaaagtagctgggattaaaagtagctgggattacaagcgtgcgccaccacactcagctaatttttttttattttgtagacatggagttttgccatgttggccagggtggtctcgaactcctgacctcaggtgatccacctgcctcagcctcccaaagtgctgggattacaggcgtgagccaccatgcccagcctagttctactactttcttactgtgtgactttgggcaatttacttaacctctctgggcccaagttttctcaactgtgaagtaaagaaaataacagtacccaccttacaattgttaaaagggttagtgagaaaatatttataaggtccttagaagaatgcctagcacataatgaatgctaatacagtgtaggcaattaatactgccagcagcaaactcatctcttttggtgtttcataatttacattccttaacttttaacattgacctaatcaaaaaaacaaacaaaaaattaaaaaggagaaatcacgcaacgattttagtagaagaaatataaattattcccaatccaagtgtaaattgtttccgtactatctgaccaaaattactttggatgatttatatcatacatcctttccattgtgggaggcatgagcattcagtaaaatacagttttgaaaataaaatactactctactcagatacacctaaagcttagtgaatagcaacaaacagaggaaaaatcaaactgcataaaatacaggataatcctcctgcattatctacttactgggcattaaattaaagccatttccaaaagtacttaactgcttcatatcataataacatgtgttattttcaaactgttcaacatgttcctgttaaattggaggggtcctgagaggagtaggcttatcatgccaaaataacatatcactactcaactaagctgctgctcattgaactcgaaaaacctcactggcctatgctgtgccagtggaccccacagaactaaaaactgctcacaagacagaaccacacctcatgttgggaaagaacaggtgtgttgagcacatttgagatgggagaagaacaattcatctttttctctaaaatatgacatacttttgtagtaagatcatggctaaatcaggcagaagtggattcaaattccttttttaaaggtgtgccccttggcagctgtatgaactttggtaattttctaattgtcattgagccttagtttcttcatgagtgtaagtggagctaatcatatttacctgtgggctctctcagtccatgttgtgctgcttataacaaaataccaccaaccaattaacttgtaatgaacagaaatttattggctcacggttctggaggctgggaagtctaagattgagggacagcctcctagttgtgtcatcccatggtagaagttggaaagacaagaaagggcaaaggagagagaggaaaggtgacaaagtctcccttttacaacgaatccactcctgtgataaaggcgttagtccactcatgaaggcagagcctccatggcctcttcacctcttaaaggtttcacctcttaatactgttacaatggcaattcaatttctacatgagttttacaaggaacaaacattcaaactatagtatgggctaattgcagagtatgttaggatacctttacacacaaacacatatatatgaacatacctatatatatatgtgtgtatgtatgcttatatacatgtatatatatgtatgtatagacagacacacatctaactatctggcagataggagttattcagtaaatgaatattctctgttttcttccatatatattagtaatagcaaggtatttcagaggaatttgaaagcaaaagcattattagcggtaggatagtaatgctctactgattatcacaattttaaaaaacgtcttatgtttttatcttgatatgtggttgatgtatgagatcatagtctcctcctgctcccaagggaaattgatttccacctcagggctgccattaatgagctgtgggttttgggggagttaacctccttggtccactatttctgaacattgatgacatggatgttctttaaattactttacggttctttacagccacaaaatgtgctgatttttcctcgctctacttgtagccctgatttttttgttgttggcttacaatgcttttatttcattgccacattgctatggtctaaatgtttctgtcccctccaaattcccatgttgaaatcctaagcccccaaggccatggtatccagaggtgtggcctttggaaggtgattagcttatgggggtggaggcctcataagaaaaattagtgcccttttagaagaggcctgtgtgagaccgctcaccccttctaccctgtggaaacacagtgagaaggtgctgcctctgacccagaaagtagactctcaccagacaatgaatctgccttgatcttggactgtcaagtctccagaactctaagaattaaatttctgttgttgataagccatccagtttatggcattctgttatagcagactgaacagggttagatacatatgtattttagtgcagtattttctattctcataagtactgtaccatctgaattcagctggaaagttccaattttacaatactttgtgcaattttaaaaatctttctttaatgtacaactcactgtgatgtacattttatacatcccatgataataatttgacaattcagttaaagttatatttgttgaatttagttttcagttctgctattactgcccttttctaaaattgggtctattttaaacaggaaaattgaagccatttaaaaacaccacaaaatttgatttcaaaaaagataaaatattgcttttacaattgtaatggcaggaagcaagtagcataatgaaaaatgtaataaccatagtagaacactaaaattctaatggggacaccttacgctcatgacataaactaataaaaggcatcatcatacatgttattttgtaaaatgccagaattcttaatctagggaagttgggggaaaatgctcatttatgggatgctactaacccttcatgttattataaaggagtgcatcagggccgggcgcagtggctcacgcctgtaatcccagcactctgggaggcctaggagggcagatcacgaggtcaggagatcgagaccatcctggctaacatggtgaaaccccgtctctactaaaaatacaaaaaattagccaggcatggtggcgggcgcctgtagtcccagctactggggaggctgaggcaggagagtggggtgaaccggggaggtagagcttgcagtgagccgagatggcgccacagcactccagcctgggtgacagtgagagtctctgtctcaaataaataaataaataaaaaataaaaagaagtgcatcttcaggtgggtgatttgtctgacgaatggcaaactgtacctggctagcctgtatttcattttaacttggggaaaaggtggtttctcttgtatacctttccaatgagtgtagctcaccatcattgcaacacctagattcccaggcatcagtggtctcccagtctcctgaacatgatgagagatggcctgttctcaatacaaagccatcatgaaataaatgcagggcacactgggctattctgggttcttttcccaatattgtgcctggcatgaaatgcagaaaaacagcaactttcaatggacaaatttgaacctgtagtgtaagccgaagtttctggaatggtatttttattcttatattataaataaatgttagcatggtcatgaaataactaagactgaatggagagcaacattagatccattgaacaatataactttgtgtttatccttcttcaaaagtgtaacttattatttaagttattactgtttgttttaaacctttgaataatacataaaatgatagctctgtggacctgcttgtcctggtggggctggagattggaggaaaaaaaaatattaatgatgttgcaggcagaaagaagacaaaaactaaacaaaagcacttcgccttttccccaaaggttggggtgatatttaattatgaaatgtcataattgtagtgataacaagattaataataacaattatgtaaatgcctctggtaattgcaattctattaggaggctgagtatttttggtcactattgtgccaccttgtggtcacaagagaacacatgttttttccatgaagtaaatccattaagttttaatttatccccgactgctatggaatgatatttggaaaaataacttggaatgctcggtgtcaataataccgataaacaaaatataatggacaccattcaagtcagaaaatagcaggcactgaaaagcaacaaataacattgttctaagtatagattccatgtgctagatttcccccagctacctcaacatggattacatatttagaagataaaattgtagtttctttagactgccattctcaatctacaaatatagacatgaaactctggatgacatccgttgagcatctaataaataattcaacactctatttattgcaagggaaggcagccaaaatgtaggtatcgattaccaatattgtgttaaaataatcacgctaatgcatgtataggtatagcttaataaacatgattttaatggcatgagtgaatatttgctttataaatatgtatattataatctcataatttatatgcatttcaaagaatcgtgatatttgtttaaaggatttttctgttttctaaatcctgcttatgtcagtatccagatgtgatgaactgagaaaggtaggattagccaccttcccataaagtactgtctgctagaaactaaataatatattttgtaacaaattcagacatttaatggccaccatcttataccatcagtgcttatttgattaaggctgtagtttttctttttaattaaagataaaaatattaaaaacaagaaagtctcaataattctgtcattataagtagtgtctgtgggtgtatgttgcggtgtgtgtgtgtagaatgggggtggaggagggggagagagagagagagagagagaaagaagtagtatataagataatgcattctcacagatatactgccgtactagtattggttttaagtatctccatccatctctctgcctctttgtctccgttttctttgtttcttgaccttatatgtatctatttctctcttttctctgatttttttctacttatcttactctctacatattagtctctctttctctgtctctttctgtgtctgtttcactctctcatttaatttagattgaaatctaggtggtcaggtaatctagatttgaatcctagccccatggattactaatggtgtggccttagagaaactcctcaggcatctaagcctcagttgcttgttaaataggggttaaagtacttacctcgtaaaattgttctcacaattaaatgaaacatgacatattgtaaaagcccttaagacaaaatctagcacagagtaaatggccaatatatggtgtttatttttatttttgttgtctgtgaaatatatacatttttagtattccaatctgtaccatcataagttgctctaatactgccttatttatacgtataataagtgacagatgtagctcacagaattttaaaaatgaatctcccatgtacctcttctaaccactttatcaatgaatcgctcaaaagaagaaggtgtctttcttataatcatataattatttagtagatctgatacaggaattcatatcttctctatccttacacacagttcattgcaatgaataataattcccaatgtaaatcatgccttttttagtagtctgtcttttcttttctctttctcttctttctttccttccttctttattcctttcttccttttttctttctttgtcttccttccttttatatttctttctctcttaaattaatgcagccagtgacataacaattttcaacaagtactcgatttttataaaattcattaattcatgcattcatatataccatgtgtcagatcatgtgtagacattttgaaggtaataatgaactaaatagaaaaaaagatacttccctcatgaaacttaaaatacagtgagagagtggctaggcgcggtggctcacgcctgtaatcccagcactttgggaggccaaggtgggtagatcacctgaaggcaggagtttgagaccagcctggccaacatggtgaaactccatctctactaaaaagtacaaagaaaattagcttggcttggtggtacacgcctgtaatcccagctactcgggaagctgaggcaggagaatcgctcgaacctgagaggcggaggttgcaatgagctgagatagcgccactgcactccagccagggcaacagagtgagactctgtcttgaatatatataaatatatatatattgtatatataatatatatacaatatatataatataaaatacaaatatacatatatatttatatatacatagtgggagagacagaaattaaagaaacaaatatatttcctcctgctaagcctaatgatgtttaattatcaatggaccacacatacaatggtagtcccataaggttataaaaccatatttttaatgtttttttttctgtatcgagatgcacaaatacttgccattgtgttgcaaactcctacagtattcagtagagtaacatgctgtataggtttgtagcctagaagcaacaggccatatcacagagtatatagtaggctatatcatctattaatagttttgagcaagtacactctatgaggttctcacaatgacaaaaatcacctaatgatgcatttctgacaacacgtcaccattgctcagcaatgtatgactgcaatttaatgtcaggtaccattaaggggaatgaaataaagaataaagaaacgtacccgtgcaaagataagttgccattttaagtagggtagccaatggaggcctctgagtaatgtttacccagataaccagaatagagaaagcaagccatgtggatacctgaagaaacagaattctaaaccagtgcaaaggccccgaagaagaatttgagaatctgggggggggtggcagtaaaaatgaagattcagttttggccaggttatgtgtcagatacccattttatactcaaatggggacaaagagtagaaggttgtatatgtgaatttagagttgtggaagaaagatccataagatgcacatttagaaaccatctgtataggtaggtaggtagataggtagatgatagatagatagatagatagatagatagatagatagatagataatggatagataatgacataggcttgaataacacctcccaggaatcaaatggagatagggaattaggttgtgagatagagctataagacatataactatatatttcttataataactatatatgtcttataattttgtaaaaaatacaaaaattagctataacactgtgaggttgaggcatgtcttagtttatttagtgctgctataaagaaatacctgaggctacgcaattaataaagaaaagaggttcatttggctcacggttttgcaggctgtacaagaagcatagtgctgccatctgcatttggtgaggacctcaggttgtttccactcatagcagaaggtggaagagacttggcacatgaagagatcctatggtgagagagaaagcaaaagagcaagaaggaggtgccgggctctttttaacaaccagctctcatgggatcttagtgagaactcactccccgtggggccgattcctcatgaacaggtaaatagaagggcattattttattcatgaggactctgcgcccatcacccaaataccaggcattaggccccgccaccaacattggtgatcaaatgtcaacataagatttggaggggacaatattcaaatgatcgcaagacataagggaaaaggcagagaagaatggttacttaaaagccaaataaagaatgtgatccaaggaagagagaggtgatggattgtcagtgacagaaccaagcatcaaatactttggaaagaatgtctggggtaaatgcttaactgaagagggttcaatagagaatgagagatgagaaagtagggaaaatgtttgaaaagtcttgatgctaaggagggaagacaaatgaagtaatagctggagggagatacagggtcattagaagctttcttttttctttctttctttgtattttgctttcttttgttagtgggaggtagttcagtatgtttatgaacagatgggaatgatccctctctaaggaaaaaatagataatgtaggagagaaaggataattaaagatgcagagtccttgaatacatgagaagggatctcgtctacaagtagagggaatggtgagagctcatctaaactacagacacagaaagggaaaagcatgcacaggtagagacgcagaggtggatttcatgttgggtgagagagaactgaaggttgaagttgttcactctgcttccattttttttcagtgtaatgagaagcaaggtaatcagatgagagtgcaggatatcgttagaggtttgaatacaggcaggaaaggttcaaatactcatgtcagagactaggagattaaatagactaggaccattaaacaggattgtcaggcaatataataggattgtatttttaatttttttttaattgaaacaggacatcaccctgtcacccagggtagagtgcagtggtgtaatcttggctcactgcagcctcgacctcccaggttcaagtgatctctcacctcagcctcccaaatagctgggactacaggtgtgtgccaccatgcccagctgatctttatacttttttttagagacagtgttttgccatgttgcccagaccggtctctaactcctgagctcaagcgatccaccgacctcagcctcccaaagtgctaggactgcaggcatgcatcactatgcctagctaatttttgtattttttgcagagacagggtgcactatgttgcccagactggtcttgatcttctgagctcaagtgatctgcctgcctcagcctcccaaagtgctgggactacaggtatgagccaccggccaagattgtacttttaaagtaacacaagactgagcatggctgtatgtttttcttcatctgtaacatttgttttaaactttagtttccaagaactgatccattgaaaaaaatccagctttccaatataacatgttgcatttttgtgaatgacacatgcactcacaattcaataaaagagatgactaattttatctgccattgaaatattaattgtgaggatctgggaatacgtggctagatcaccattacaggtcaagaagaacctcttgctgcttaagtataacaaagagcaggatccactgtctctgcaatgtgccagctcttcatccttttttctatttggtcacatattaccacaactgttgaagggaaataggtaaagtggttgggactctatcaaaaacacttatcctagcccatggatctgtgtactgtttcacaacctttctggtatatcatattaagacataatagaaggtactaagtgctgaatacatgagctagagaaccaagagctgtttaaactaaaattgtcctagaacagcagccacctggctatgtgggttgatgctggagctaaatagcaatcaattgagaaatgaagatttcagtcaaatatttgttcatcttcataataattttacttactttttccatccatggatttgctgtgttttttcttacacactcgtgtacaatgtcaaaactggttctttcccttaaagccagtcccccacttttggcagtgagagtaaaagcaatttttctttcttttttttttttttttaagtagagacaaggtctccctacattgtcaaatttatgagctcaagcgatcctcctaccttggcctcccaaaatgctgggattacaggtctcccaaagtgctgggattacagctagcatgccaggcctccttaatggatttagtgccgccttcctttgggatatattctttgatatccctttagaactaaaattcgattttaaaatttacttttcatgctttcaaaattcactattatggacatgtagttaagtaatactaaaatctaatagggctatttccaatcaatcaaaacacaaagaataaagatgttcatttttcacgaaaagtaagaatgagagaaagggatggaatggattccagtctgacaatagctttttagtgaacaaatgaagtattcataaaggggagtgcgggtgtatgctagagcatgcattgtagctactgtcccaatgaacagtgttcaatatatttttaaagtattgaaaaaaaggcatttacaatggaaacaaatctttaccttaatatacttttttgtgactgccataaactcaattgctatatgtgaatgagggatgtttgatacaatatgtgaatgagggatatttagttttcagtaaagctgatgtttatcaggtggctacagtaaatcattgatttttattagctatcatagcgtataagcaagagagaggctctcaaaaacttgttggtatgcttgtttacaaatacttacagaggaaacactcttgtaaatataaaatgcactatcttcttatttcctggttatttgcaatgaaagctgccagtctactaggtttttccaggagcctgtatgaaggaaacccatatctatgttaagaacattgtattgaaaagatagaaacacggtttttaaattcatatgcagttactggccatgaagaaagcaagtaattgtctttagtttggcatactctactgaaaactataatgatactaacaatagtaacagcatctttgggtggatcctaagagatatcagattaaagtcactacgtaaaaaacaaacagaagaaataatgatgtcatgttgaatgttataggacagggatccccaacccccagtacaggtcgatggcctgtggcctgttacgaactgggccacaaagcagaatgtgagtggcaggtgagcgaatattaccacctgagctccacttcctgtcagatcggggcagcatttgattctcgtaggagtgtaaaccccattgtgaactgtgcaggcaagggatctaggttacgtgttccttatgagaatttagggataggtgtaatgtgcttgaatcatcctgaaaccatcacccacaactgcccctctcgtgtccgtggaaaaatggtcttccatgaaaccagtccctggtgccaaaatgttggggaccattgttatatgactaaaaacaccaggtcagggagaattaagttaataactgttatttaactgtgcttgtatcataatcattcacattgtataactcccaggggacttatattcatgcagaagtgcttaaaattgattttaacaatcatatttctagtagatcaaattattaagatggccaaatgacataaggtaaaatttctgccactttagttgtaccgaaaagatcacagagaaaagtaacaagggaaccttaaggaaagtcttgttcaactccctcttttgcttggagaataaaatcaggataagagaaatgaattaacttgtccatggagttttgataagtatttaacctcaataatcactaaatgcctttttattttatattttattttattttattttatttttgagatgggatcgcgttgtgttgccaaggctggactgcagtggcatgatcactgttcactgcagccttgatctcccaggctcaagcaatcctcctgcctcagcctcttaagtagctaatactacaggaacatgccatcaaacctcgctacatttttaaaattatttttagtaaagatgagatctcactgcatggttcaggttgttctcaaactcctgggttcaagtgatccacctgtctcagcctcccaaagtgctgtgaatacaggtatgagctaccatgcctggccactaaatctttttttaaataaaaatctttagtcctaaaatataaaggattcagaagaatcccattttgtttgaggtaattagcataactgtttctatttcattggaatagattctgaaaatcaagatttcaccaaaacttatgggtcggttttatttatctttaatgtttgataaattttcttcctagaatttctcatgaaatgcaatcatgtattattttttaatcccattcatcttcatatttgatttttccccctctgttgtgttttactttaattgattcctcaaagctgttctgaaatttttacccacatctgccaccagatttgattggctaattgtcctctatggaagcacacccattatgcaactgttatgaaaacttttacaacaaatcaatgtcaggtcaacaaacccatcagccatgatctcactgagaactaatattttcaggaagcttttcacttattttcaggggctgtctgtgggtttagcatttcatattattaacagtgcaatgacaaacctagggcaggagagttaataatgggatgtgctttttcctcttgcttctaaagaaaatattcaaatgagcagaagttttaaaagccctgttcaatactgagcttttgatattaaaataaactgacaacttgactctgacagaataagattcaattaggcttaaaggtaggtctaaaggggctcagggagaaataaatgaacttctattaatttttagaaatagctagtaagaacaagtcatttatgactttgtagttaagttcctagagaaagtttaccaagaattgctttctatgaggcatggtggtaaaagctgcaaaatgaattatggtgaaaatatgcattctactttttatttttccttattaaatccagcaagggaattttcccgagcctctcccactagtgcattttgttggtttagaagtgtttctgctttcactcattaaatagctaaagatcaaaatattatatgaatgatttagttgtttctagacagataaaatattttcttctcctaatgagtagagaaatatgacttccgcatgtcccgaaagagcattcacccagtattctttgtagccatctaaacaaaagaacaaaattgcatcatggtcttaataagaaaaacaaacataagaggtaatgaaaatggaatcatatctcttttgtatcagtaaagtaatagagcgtatcaggttttgttccttattatgaaataacaaatttttagagaaaatagaaaacaaacttaagaaaataaaaacaaattgtaatcacatcaactaggtcacttgttaaactatatatacacatgtgtgtgcctgtgtgtgtgtgtgtataatactggagcaaagacatgggagcctgaccttcacaaaatgccatggggcccccatcagccatggaatacccatctctaaatgttttttcatgagagaaaaatatgtctatttggttaatatattgttattttgaatttttctattgtagacaactccaactaatctatatacacacatacacatgatctattttgcttattgtaagttattttgcatcatgttttatttaaaaaatattgcattacagtattacttatcttgattactggtgggtttttttttttttttctttttggtgcctcttaaattttatacctgaggagagtagtgccttacttacctcatcctaattctggccctgaggtcaaacatagcaaaagataaaaatatagacattgatataaacagatataatttttaatcaaaaaataaaatcaaacaatagtacaatatgcattcgcggtggctcacgcctgtaatcccagcactttgggaggccgaggcgggcggatcacgaggtcaggagatcgagaccatcctggctaacacggtgaaaccccgtctctactaaaaatacaaaaaattagccgggcgtagtggcgggcgcctgtagtcccagctactcgggaggctgaggcaggagaatggcgtgaacccgggaggcggagcttgcagtgagccgagatcgcgccactgcactccagcctgggcgacagagcgagactccgtctcaaaaaaaaaaaaaaaaaaaaaaaaaatatgcattcaaaattaagtgaagttcttaaacacttttcaggatataattttttattgcaaaataatccaattttttcaattattgcttttgcactaagtactcttaagtgcaacatttaatgatcactaatgagatcatattcaaggtgttttgagttcttaaatgcagtatttaatgatctccaatgagatcaaattcatgatgtgtttagttgaaacaacccaaagttaaacatttgcctgaaaacttcacagactcctctatccctctatggaacagcaggcttacaacagtctagtgatagatttgcaaaaatcaagaaaatatacagtgtcgaaaaatagatcaaaaatttatcttcatggaatcattcaccttcattgattttattgactgatattaataatatctctaattctattttatgaacccatttggaagccacttaatatgtaagggtacttgatcaaagcatgtcaactacaatcagtttgaacagaaaataacatgtattggccgggcacggtggctcacacctgtaatcccagcactttgggaggccaaggtgggtggatcacgaggtcaggagattgagaccatcatggctaacatggtgaaaccccgcctctactaaaaatacaaaaaattagccaggcatggtggcaggcgcctgtagtcccagctactcgggaggctgaggcaggagaatggcgtgaacccgggaggcggagcttgcagtgagccgagattgtgccactgcactccagcctgggtgacagagcaagactctgtctcaaaaaaaaaaaaaaaaaaaaaaaaaaaagaataataacatgtattaggttttcgttgtgttttgttttgcttttgagacagggtctcagtctgtcaccctggctggcatgatcacagctcactgcggccttgaccttccaggttcaagtgatccgcctgcctcatcctctagagtagctgggactacaggtatgtgccaccaaacctggctaatttttctattttttgtagagatggggttgctgtatgttgcccaggctggcctcgaactcgtgggctcgagtgatccttccaccttggcctcccaaagtgctgagattacaggcatgagtcaccgtagtcagacacatttattgtttgtgtacatatttacaatcatcatttagttcatcctaaaaaaaactatctaaattttttctttttttttttttgagacggagtcttgctctgtcgcccaagctggagtgcagtggtgtgatctcagctcaccgcaaactctgcctcccaggttcaagcaattctctgcctcagcctcccgactagctgggattacaggtgccctataccacacccagctaatttttgtatttttagtagagatggggtttcaccatcttggccaggctggtcttgaactcctgacctcgtgatccacctgccttggcctcccaaagtgctgggattacaggcgtgagccactgcacctggccctgaattttatctccactttaatgaggaagcaccaacatttaagtaacttagtcaaatttactcagcctccaagaatcaaaatgagagaccgttctcacatcctttttactcaattcagcctgatgtttcatagcattactctaggtcagcaatcagcaaactttttttttaaataaaggatcagatagtgagtgttttagattgtttgggcccacatacagcccctatgtcacccactcaactctgctgttgcagctgggaagcagagacaatctgtaactgaatgaacatagctgtgccccaataaaactttattcatgaatacacatatttgaatttcataaaacgtttaaatgtcacaaaacagtattcctctcttgattttttgctaccgtaaaaatgtaaaaacattcttagttcacaagctgtatgtataagttgtgagcttgatttggcctatggacacagtttacacacccttgttattctttccagaagggaacatgtggtgccctcacttaaaaatatcagaaaagtgcagagttttcttttctacaggtctagtaatataaggatgttctctcgtaaagcataaatctcggttctgggtcgttttcctgacccagataattttccgtcaataattctcttcctcgtactgtttttcatgaataaaaggagacagatacattttagaaaagcccatatatatggtgtaaggaaagtcactccacacagaagaattgaggctgtctttttaaagaatggattattattatttatttatttatttattttttgagacggagtcttgctctatcctctgggctggagtgcagtggtgcgatcttggctcactgcaagctccgcctcccgggttcacgccattctcctgcctcagcctcccgagttgctgggactacaggcgcccgccaccaagcccggctaattttttgtatttttagtagaggcggggtttcaccgtgttagtcaggatggtctcgatctcctgacctcgtgatccgcccgtctcagcctcccaaagtgctgggattgcaggcgtgagccaccgtgcccggctttaagaatggatttttaaaataaaaatcttccaattatgctatttctaaatgtctacttttctctggatgtctaccttttccatttaagttagttcttcatcagaacttctaataccatcaattgcattcaaaagtctccaagatggcccttctaaggtatctgctactccagatatttcagccctgttgtcaagaagcatagtagagggtttccttgaagaatttgtgtgtggatagcaggaaggaggaggagaggggagaaagagaacagcgtaccattgatgggctattgtcagagcagctgctgtgtcagtggcatctgtgggctctccaggcgaatacacagccaccctgatacatccatggccaaaggcaaaagagcaacttctcctctctgtggcagcagatgcccctgttcttcagttgatgaaaaaatcctagcagaggaaaaggaaagacagaggaaaggagattgttgggttgttaagagatatgagcaggagggagaggttgcaacccacttctccgcccgctttctgctggccccagagaaccctatactgtgagctcagtttgtaactagcttattcacctagggatgactctattgcagggctaggacagagaggactgaggcactggcttcgtttagtctttggtgcatttgatctcacctataaaaggaaacaaatgtgtgtcctttatttgtccccaactacttttcatttgcttaagacaatcctcttcctatattttgcaaagaaaaaggcagagcactctgcctcatggaaggcaatggtatcagggccagctttttttttttttttttttaactgaggccactgcagtagcttttatctactcacagttctttctggagtcaaggcctctggctatttaagccatctcccttcttagcaagttaagattgggacaaaacaattataattctagaacttgtcagcttgaatcgaaccatcacaaaccaatcacacaaggctgctcccttcagcccaatcgttgagatgattttcccacgacctggaatggactttttagatcctttggaaagaaaactcaccggcaagtacatctctctgtctataggtcctttctatccagaaatttgttgagatcattggtagtgggtgaaaacatgtcctttagggagaaggttttttagaccagaagcattagttatggaggttgtcattgttgttgtttcttccaaggaagagaataaaagtgtaatcacactaggtcatgtgtaaatttatgctgtttttactggctcttaacccttttccttccaggaattgttaagttcctttgcagtcatatatcagcccttgggtatgttctcaccaagggtgactgtttgacggtaaggtcccctcagtagaccaacagaatacaagtcaggtcatggaactgattccctggaaattacgtaagagaaataaataccctggtttttgtacagagaggaaattatgaaatcgagcctgaatccatagactctcttaaattctcctgtgagaaaatttttgcttggttcgagggggtcttcagtggaattaggggtaaaaccttttgtatgagagatctccagtttctaagttgtttgaaaggggctgcaggtcaggctgccttctgatggagactcggaggggttcaggagacaggagcgagcacagaacatctgtcaatgcttagagctctttctttttttctttggttttatgtcatgacctgtaactcaactcacagagaattgctttccattatggagaaataattccaacaatgatttttttttcttgctgactggattgtctcaccctgtgggggtatggcttggttttatattatcaggcatgtttggtgctttttctgtgtgttgctttgataggcaacgcttttcagcggaggctgtggctcgaatcatgcaggtcttgagctgtattttcagagatgaacccagtgctaaatcgtggtagtaatataattcacagcactctgcgtggatcaccggctattttggggtcccaatcccctttatgtaggacttgaaataatgtacggactatggagagaaaaaaaaggaacaaaggcaagcaatgcttaaggaaagaagatagaatacagggaggagtaaactcatttctgtttaattcacttagagaagagcattgattcattttgaacccaggattaaaatgacttgtataaatttccattatactgtctggattttgaaactatggatacggcattggggactaaacctgttgggctaaatgatactttgatcaggtagatgttcagattgcttctgaaaaaaaatttaaataatatgtgcattgtcttttagtctaagggaactgcttaaattatgtgtacttagctcatgttttactgacatgttgaagctgtttagccttacagctttacagattgttctacttttcaaaaatactgagagttgccagtgtctattttgaatgtttcatattttagtgcataataaatatgtgtgtaatgagtgaataggtgactttttaaattgcaaaatgtaactggactctaaataccataaaatcaagatcatgaaggcaggttatgagaaagagtcttagaactgaccacagctcttctgttagaactaagcaactgcaaatcaaatcttagccctcttcatcttttgataaggtttttggatgtgtcatcattgggtcaacagatataattgtatatgtgcatgtgtctgtatgtgtgtgcctgcatgttcatatactttttgaatttgctttctgccaactaaactattaagtatataccttccttagcttaatctgtgcaaagaaggcattgtatttttatataaaaataatatacagtaaaagcaatagctttggactttgataggtaggacatattatttttcaaggtttttttttaaagcattcttacacatgctaacacataaaagaggtttaacctcagtaaatgggaaagctggctctcctaattaattttttcccaagttgacttaaacaggcaaaatgtgagtattcacatgtttctgtttacatgcagggaaatggcaatcagattacaaaaaaaaaaaagcttatttatactgtcagttcctgccttactaaaacttggtgactcagttatgcaaaccatacaaaagaatagacttttgtattactacacgttttgaaatgagatctttgctgataaaaagatcagaagctgaaacactggtgatatagtttaagtctatgatataaattcagagttgctctatcgctaatcctagaaacaatttctgaaaacatttgcttataatagtaattcatttaaatttatttaacacttaaaatgaattgtatgtagctcaaatccaaatgatgcagatgaaatgtctggatttgagcctaataggtacattaaaaaatctaattaagcacctattttttttcaaccttataatttctgctttaatggcaatcaagttaaaaaaatgtacagttccacttagtcataccattcctttataaaaggcagatttcaagtaaacttctaaatgcacatataatgtagaaactaatattttctgacagtccttggttcctgaaagttgaacttcatcatatgtgttttaaacttttgtcaaaatagttatgaaagatatgttacttttgcattatgaggtaatttattaggggcgggaactcataagacagtataaatccacttgtctaaacttgcatgaggctgtgtgcattgtaaaatgtcacaaagagttttgggtcagtgaatattttgctgaaggaacaacgcttacttttaactgagtacttttctgcaataaatagcaaagtaggtttttgtagctgtaaactgtgtacacagataactacaggctagtctgtcatggagctaaaagtttcacctgaaaacttgcattttcttttaatagtcataatgctatgaatattattgtgctatcataaatcactaatgttattggtagtagttgggtacagcatttcatttttgcatagttgcaatacaaattttatttatttgtaatttatacactaggacattgaatattaaaacataaatttcttggaacactgaaattaaatctcgattgaggataagtgcctacagaatggaaactggtcaatgataaaggaaacattcaattaaacctgtagatactgatcaaatttatttttaaagtggaagaaactcttagacagagaaccatgaaaattgagccaagcatttggaatttggtcctgcataaggagcaaaaattcaaatttcatatattttagagttaggaaagaaataatgtggaggatatgtaggggagaattagaaagtggctttgaaaaatagaggtcttattttaggtttctagatttgtctgagcagagatgctaggaaaagttatactctgcagaaaacagaggaataaacattgaatttgatatcagcaggctaggagtccacacgtataggtcccattcacatgaagagatggaacataatttctatatctctatttccttttaaataaaaattggaatgttggaaatcatattaagaaaacaaaaatggaagcaaagataagatggtagggctgcatccagaggcaatggatgaagaaatgacagtttgattaatgttccaacagccttgttgacacatcttatccttctgctcagtcatctgtagatctctccctgtgtaaagaatccaagtgtcaactcaagatctttgtcttgaaagactaaaatctggtccaagtttaatgttcaatcttaatatttctttaaatacctttatgaatttattcaaattctgatcatcaattgtgaaatccattttacttttttctctgtttcatgccaacctgtactatcaaatatagaactaatatgttgctaagttcctcagatgcttacctctccatttatgactttagcacttattcaagcactacagaaaattctgttacttatttatagacttattgtatgcatgccttattatcctagctaacatgtttgatttattcactttatcattctcatcatcattagtggcagtagcaatagtgacagaataaaaagatacctttgattagttgatcacaaagtgttaggcattttacatatattatttctaattcctattacaatctttcacgactagtaagtggcaggttgcaaacacatgtcaagttgacccaaagctcaacctctccccactgggcaatactgccactagtgaagtcacataatttagaacatccttgagattcaatccattgagattttgttagaaagaactgcattaaaaaaaagaaaaaaaaaaaacctttaagagttcataagctttgacctagtaattgtacatctagaaatcgataatgaaaggagaaaaatatgaagataaaaaatctccaaggccaggcaaatgcatacttataagggtaaaaaacaaaaaaaaaatgaatataaaggtataaggataggtgacaattaattatagttcataaaatatatgtgagcattaaaatatatactttcaaataatttttagttgcatgacagatgcttgcataatataaaaagtgtgatgctcatgcactaaaagtatgacacaattgatcttaaaattacagaggctaggcgcagtggctcatgcctataatcccagcactttgggaggctgagtttgaggatcgcttgaggtcaggagtttgagaccagcctggtcaatatagtgagaccccatcattaaaaaaaaaaaaaaaacccaatatgttaatttttaaaagttataaaacatagacttaaaaatagaaacagaaatagaggaaaaggagaaagatatatcaaagtatttataatggttatctttcaatggtaggaatatgaatttatattattttccacatttatctacattcttctacattttcaaatgcttatcttttacattttccaaaatagacatacatcattgtagcaatgatttttaaaaataccaaaaaatactctttaaaaaaacccacaaattcttaaatttatttttttttattttttattttttattatactttaagttttagggtacatgtgcacattgtgcaggttagttacatatgtatacacgtgccatgctggtgcgctgcacccactaactcgtcatctagcattaggtatatctcccaatgctatccctcccccctccccccaccccaccacagtccccagagtgtgatattccccttcctgtgtccatgtgatctcattgttcagttcccacctatgggtgagaatatgcggtgtttggttttttgatcttgcgacagtttactgagaatgatgatttccaatttcatccatgtccctacaaaggacatgaactcatcattttttatggctgcagagtgttccatggaagtcagtgtggcgattcctcagggatctagaactagaaataccatttgacccagccatcccattactgggtatatacccaaatgactataaatcatgctgctataaagacacatgcacacgtatgtttattgcggcattattcacaatagcaaagacttggaaccaacccaaatgtccaacaatgatagactagattaagaaaatgtggcacatatacaccatggaaaacccacaaattcttaaagcccacatctgaaaatctagacattcaagtatgtacattttctttcaagagtatcattacaggccgggcgcggtggctcacgcctgtaatcccagcactttgggaggccgaggcgggcggatcacgaggtcaggagatcgagaccatcccggctaaaacggtgaaaccccgtctctactaaaaatacaaaaaattagccgggcgtagtggcgggcgcctgtagtcccagctacttgggaggctgaggcaggagaatggcgtgaacccgggaggcggagcttgcagtgagccgagatcccgccactgcgctccagcctgggcgacagagcgagactccgtctcaaaaaaaaaaaaaaaaaaaaaaaaaaaaaaaaaaaaaaagagtatcattacagtgttgttgacgttactgaaaatatgttttgcattttcctcgtagcttgtggcatattccataaatatctacaatagtgattagttttggctgtctgaagtttgtgttgtttgttttaattttttgttttgtttttataagttctggaaaaagtcaagttgcatgactctcatgatcttccaaagatgtattactaaagcaaagagacattcttacaggtgttttaaacatgagattcagtttgctaatggtggcacctctcactggaaagcatttcttactgtgctgtagagggtgactatggatgctggtggcagtctcactttccctagtggctactgaacgtgtttgtgtctcctttagaaccaatagtttctaatgaatattttctagtctcctctacttcctccttccttcctatcttccctctcttcattattttcccatgcaaatgtacgtgcaatacagaacatcagaatagcacatcctgtaaagcacaaaagcagtgtttgtttcctggaaaaccctccgtagaggctagcttattattagtcttcttattactgcttgattactatgattaaatgatgatactacacccttccagttataaggcttgcctttccccagtggcagtgatgagtctgtgcataatgattgatgttttctcagctggcacctcttctaaccaatgacgtgcacttacggcaaggctacctgatctaaggaactgccatccgtggttatagagggtaaaccgaggctgtaaactcattacctttgggagacctaatgtatcccagaaaacacagatgaaatgatcattgtaatcactgaatcaagaaacatagtaatgtagggtctggccctaaaatgaatatggtattttcagagtgtaattgtctcactcatgtgagataaatgaagtcttccagagcatgacagaataggtaatttactaaataataacatggaggctctggaagtgtgagcttcttaaagaacagccccacttattgattttggttttaacatatttgatggaaaataaaggtcataataataaacggataaagtaagcactgaaatattttctcaatacatcagtacatgattttatgtgtacatataaacatatggatagttgcaaacacgcgggtatctcacttactcagaagttttcctcagctatttataacagcaaatacaaagactaagccatttaaatgctctgagaagcaaaatagatgccataaatccaaatcctgaagcttttttacccaaaaaggaggttgaccaagcgaaggtaactccaaattcagcatctgctcatactatttcaaaaatgcatctttagatatgttaaatcatatttgcttgtacattactttagcaaccttggttacataatttatcagcccagcacagattagaatcaacaaattaggcagagcatggtgacagtctgacagattcaaggcacattatcagaagcaaaaatgagaacggaaggctcacattgatggagaagggaaaacaagcagaagggcttaaataagcttagtctagggtcatttaatgcaggagaaaaggctctactgtaacctgataggcctactgtattgcaggtaaaaaatgaaatagcttatgtttattataatcatattgagtaatcatcaaaagttatactaaaacatactgttcctttcattcatttccatgtaactgacatttattcttagaaacaacttataattcatatgcttgattacctgtatatagaaaggtctggggcatagcaggcatttaagaaattaactgaatgaggagccactcctatcttctgacgtgttctcagcatccttaataccactacacatagtaatatgtcatatgtattaaatcttccattacaaagtcttaccctgcttcattccattcttcaaaatctaagattatcgttttatttgttgcttgatccattttagtgcataatcataagctgccttatattgttgtttaatcatttaaatgtttcacttctgccttgttcatcttctcagttagacattttgaactcttaagaagaggaattactcccgctaggacacttctgtctttcatctcacctagcatatagccaaagtacaacgtagttatttcaacaaatacgttcactgaatttaaaaatatgaagattaaatattatcaatgcagtaagtgaaactaaaggccaaaactgttttccaataaataagattacatacagtgccttaaaataccacagtaagtggcttgttctcatagcagcagattgcaaactcagcctgtctacatttccgggcaatctgacaatgatttatttactatttattgctaatgatgattactttgaagattagaaagtggtttttaatatccagtggatacaaatgccaggagcgtttgatgttttaccattgtgaatttgaactgcatatacatggttaatgtaagtctgaaagtatgtctaattgttggggatctttatataaatgcaaaggaaagatctgtgcttctagtgaaacaatcaccttctgcgtcacacagctattcacaatctgactgcagatccagattgtgactaatatttggctctaatattataggtggttaccgtggagagaatcagtaagagcataattgtcatttccttggaaaaatttaatccacagatggatcccaacacccaattgcattcgtgtccaagactaatggggatttttgctaaataaggcctgattcagccaaaaaagatagactctgaatacagaaatctgcatcacgcatcacttcaaaagatgtattaaatcaaacactgaaagcattggcacacagaattttcctaatagggacatgatgaaaagtcatttattaattaaaatgcatttatattttctttttttaaaatgaagcaatgggggtattctacgctaccatacatttacaaaatttcatttgcaaaatttcatccttcatacttccttatttagctaattaaggtaatgattctacttagattggaaagttctaattaaaatcattaatttttcccgaaccttctccttcaagatctaagctttgctgcacatccttcagtctttgggaggagagaatgttgggggatgtgctgctgataattgatgagagagagcaggatacatttattatgaccttcctcccgctgcccagctaaatttatacagccaaccataatctaataactctgtgttcctttctttaaagattttcctatcatatgaaactatttcggcctgtggtgtattctttctaattagagtagaatactaaagcaaaaccatttcaatccaagttgcataaaaatgccatccctttccgagtgactggttttcaaagcgagctcattacctggaaaaacaacaacaacaaaagtgttgcctctctgaattcacgtggtttggaaaattcttagccatctacagatgcaccaactgaatcataataaagaagagaaaatctataaatgattaatttcctttttctatttaggcttaacatgttttaagggataattaaacttttggcctgtttcttagaagtccaggaggaagcatatttcagaagaagcttattgaactgagcggtgaactcattcattatcctttggttaatacagagtgaacttgtctaccctcaggttcatttagctttaggctacagcctagattcttagacatccgtctattttacagtattaattcaagctgtttataaataacacatgactaaatagatgttaaagaagacctcccttggggcaggcattattcccacgtgcatggcaacagagttcgtaacagggcttggtgaacagtataatctcaacacattaactgggaccacatcgccatttggctatcagagcagccacaccgagtgcatcatctcttgcacacccttttaatttaagtaccttgctcagtgctaagaaaaaaggcacacttgttaaggcaggagtaagtgcggatctgcgaaacctaagcaagcatatttcaccagcacctcctaggggccacgtgtggatatgaggatgggaggtggggactcgcacagaacctttccttgaattgtcagtttcacctctcctacacacaaaaatccaccccgactgcgccgtccacaataccagctagtttgctgaattagttcagcgactcaaggaggccttacgaggtttaaataaactgcacaaaagacacatttgatcgctcgagaaaataaacatttaaaaaactcagtggaaagaaagactcctaaaatatatcctgtcctttaggagcaaagcttcgttaggacaccgaagtactcagaaataataggcacttactcttcggtttacacacacacacacacacacacacacggattagtttataaagttccaggatccagacccggttaacactgaagttgctttttaggggtctgcgcgctctcgcctggctgctgggaaggagggctgggaggcgctgaagcgagggcagatctgagtgtctgtaggagttgctattccaaaaaaaatcattactctctaattgttctgattttagatcagcaaagcgtgccgggcggtggtggagagactgagggcggacaaggcgagagggaacgagccgtccacccttcggagaagcctaggcgccttgtaagtaattcgcgaacagtcgggagaacaaacagccaagcggcgctgcagtggccgcacttgcgcgcgtctcaatcctgggggctctgcgcgcccgccccagtccctcgccccattgactcagtggcttctccgggcgctgcagcctccgcggggggcttcgaagggccgaggggctccggcagagagggagtggagagggagacgcgccgggaccgacgaacaatcctgcccctgcggcaaaggtctctacccggcgctggcacctcgcaggcccctcgaggagcacgcagggcaagcggcccaagagcgggggaaccgggaagtgtgtggggctccagacggagtaggaagctttgcccaaggccaggctgcaatcaggcagccgcaacagccgggcgcggagcttcccacctgctgctgtcccagctgggccgcaacttcctcctccccggcccgggcccgactccccggccgggctccgagggtggagggggacgaggcggcggcaggttccctccgctggcaacgcctcgcagcatcctcccctccccgccgcggttcccggggccggccgcgcggccaggcgcgctgcgattggccggcagcggccgggggcggggccaggagagccggtgtcgcacggaccgcctcaaaagagcccaggatattgcagagcgcactggagccctggccagcgcgcagccttcccggcgccggcgggctgggtcttgggaattctggtttgctttggctcactcgctttttacaaaccactggatcttacatgcctctgtaccccccacttccactccatgtccccatgctcctgcgccagcaacaggtaagggctgctgtgttttcttccttttcgctcgctgccggtgtgtcctggggaatggactctggccgccgtcccctaccctaccctgccccgctgctccagaggtgcccagctgtcacactgctgtagcgctcacccacactccggagtcccagatcatgcctatatagtttgtgtgcgcaccagaacatccccagagctaaaaatactgagacatgcttggaacagttgagcaatagaaacagatttctctgcagcatctgtttgtgctcataacttccaatgcaccagctgtagcgagatactgggtttggaggcaagggcgagagcgtctgtgttcggttctcactctaagtggggaaaaaaagaaagaaaacgtggttgcgggtttgggggtgcgtcttgagccctggtcttaaaccttggcaaagcttgggactcagcactattcttgatccttggctttttttttttttcgtcattgcttcaagtatagctgtgagtttcaaacagagtgagtgtctcaaagttgccttcctgaaagaagagcgggagcccgagttggatttgagcctgaggatcgcaaaactttcacattacatatcactctcccctaaccaatttgttattttcagtaataatggtattaatacctggcttgaagacagtgtggttttaggaaagcaaaatagtcaaaacgacttgattctgcaaaaagattgcatcatagcgtggattcatcatgacaattggaaaaaaaatagggatagggaatgggcagtttaatgtctgtgtctgggtaaggatatcataggatgatcactaggataaaaggctgtgaattccgacgattttcataaattcagattttacctgttaggaaataaggtgttatttgaaaacctcggatatgcaaagaaaccatattgcgttttatcatttgttttcttttcacattaataatcaataggctgccagatttcctctcgccaaccaatgttgtgtgtctgctgtacattatctgtacacttgttagcgttttcctgctcacttccaaatgtttcatttctatttgccattatctggaaaaatcctggtgctcagaaggggtaagagatgttaattgaagcatggtggaaagggtgaggataaggtcaaggccattttacttagcttcctcctctctcatattttaatgacactttattttttaatgttcttggtctccataagaaatatttgatctaaactcatgtgaattttgcttttaaaaaaaataaaagaacacagtctttctacatcctttggattcctgagttgtagaatctctggttagctgtagcgtccttgtatgacttttgcgtagcctgaaagattgaaaacagctacctgcacagattaagtgtttcagatttttttaagtgtatatttttatttaccaaacatgtctgtttttcagcgtatgcaaatgctgagcagtgctacaagccaagtgtcgttgagtataaatgttagacagggggctcacacgtagatagatgggtatccccctcccctccccacttccccctcctcctccctcatgtttattgagcttctaagaggctgctttcctagcagttgtgctcacatagcaacatgtgcccagagcacactcaggctgttctatatggcgtcagctggggaatagctgctctaaacactcattagcagacctctctctcagcccagtacgttttcttttgctatctttatttcctatccttagaaactttcttatttattgcacaccatgaccatattacaggacacatttactctcatttgatttttttttttagttatttataagccatattggaagtattacctatatagtcaaagcaatttagatcccccatttgtaccatgtgatctccttgaccttacatttatccatagctctttctcctttaacatctacctaagtttaaaacgctgaactatttttttccattgcttatgcttaattttggctcagcctataaatagtcttaacatgaacagcaccacatgtaacctctcaatttcccaaaaatactttctacatcatgggttatggcctggataaaaatgattatttgtgtccatgaaatttacatctagacccttaaatattttggctggaagggagatttacacattgttcatcaaatcaaatttcaattctctggatttgtatcacttagtgttctcatctactcctcattgattgcatctcaaacattattttgaatatatgcttgaaataaagttgcatgtaagccctgtttttttaatgatagcttttctcagctgctcacgaattggtaattgctagtgagaggaccgggcaaggaagttttctgcttgcttaaagtcgctcaggcatgtgggcaggttaacagtaaaagcaatttttaccatgaaatattaagaccgttaccccatcaaaccttgacaggttctagactttagctatgtaatcagctccacaaaaagtctgcatacatatatgtgtgtgcacctgcatacacacataaatctgtttgggggcatatctatttaaagtggcaaaagttttctttttgccaaaaaaaaaaaaaaaaaaaaaaaaagcccaaaactcctctttttctctttccaggaagaaatggtaaaatttctaaatgatgctccacatgtggaacaaattctgttattagcaatggaaataagacaataatagtctctcaatacaggctactttcaagattctaaatgtggaaagctattcataggaagctggtattgtgtgatttgtggaattcaaacaaatgtcctggggtcaagatttttggaaagtcataattcagtctttagatttcatatggttgttatgttttaatctggaaggagtacagaaataagtcagaagaaatttgagactgtctactcatggcccctaatggtaactcacatggaaggattgttttgaatcatgaaaagggaatttcttggtgtcagcttataatacaaagttctgaagtcaatcagaactcaaaaatacaaagcattcattgaatgaagttcttctcctttttttgaaacgtatacctgcgtttggtgttgttgctgtctctgtctgtttagtaatgtgagaaaactaagatgaaataattgcttaaaaaatgctgtccatgtacaggatctagaacttcgaggggcaggattcttgtttctttggtccaagtgcaaacttcacagggaagcagacaaaacattgaagcaggtggaaggttaggaaagcacagtaacttctttttataaagtaattcaaaggcactttcaaactgagcatcatttaggtgtcaaaagctgccaaaatgtaacacacattgcaattttcaaagatgactaatctcaggaaaaatgtgttggggcacattcttgcataataacttggataaagaagaagtcaaaagacagtaacaaggcattttcaaaggcaatgcaccttgcctcttcttaagggaatgcacaaaaacaacataaatggattgctttatttgtttgcggctggcttggctgatatcggttctattaactgtttaatcttaatggatttagaggagaaggaaaaagtggagtcttcattatcaggcatcaacaaatttctgactcttttcatgagttattcattgcccccctttaatatagcagaaggatttggttgtatgaaaagttgaagatgggctttatttttcagttctaactcttattagttttgttattacacatttggtaaagaaaacaccttagactttctcttagctttttgttagttagtcaagggaaatagtttcttaggagtgaagatggaaagttgaagtacatagatagttcttagctagggaagactgaggcaataggagaaaactgagaactactatttgcacatattaagtaaaggtgagtgccttctccataggaacctataccaaataacagcgctggaagtgaaagtaagcggactggcatttatgatctgtccttacacagttgtctctgtctgagagaacacagcactggactcacatgaaatgagttcctgccttatctcaatccgctaaagacctggtcctttggcacaacggtgcttacttcctagcctgtcattacacatgacagccccatctcaggagaatttcagggctcttattgctaggcaacagaattgctctctatcccccagagcaaacctgcatcttcagagtcttcaagccagaattacctgtactaatagagacttagcaggcatttctgcatagtggttgcttaaagtgtgagaagtgatgaagcaagcccaaacagtatccagaaactgggatccatttcagattattataagcaataggggcagtattcaccatcgtaggaggttttgtccactagttccctctattttcaggatacacactcagtcaagcctactccaaaatccacttcactattctatttgtaggtgggaatctgactttcttcctctagcatttcgtcagcctatccggtctgctcagttatatcatttaaacaaaatagtctgtcttccgatttcaaccttgccatcagggactctaatattctcccgtaatgcacatgcaactcagtggatatcaatgctgcgtccacgtgaagttttctaaacatgtcctttttccaaaaattttacgacaaaccttggaatcagacagtctttcatctgcttaacagggatcctagcaagtggggcaggcagaagaagagaataagagaagggagaggtagacctgaacaatagaatattctagatccctggccaaaaagaagggaaaggggacctgacctgacattttggttgaacaactgtcacagacaactcttctatgtttaacgactttatgcttttaaataaaagttttacaaagcatgcttaggatacaaagaaatttaaaaccttataatttaatgtaaattatacttatctttacctgattatgtgtttttgttaggatatattgtcttagacagtagaattctttaagagtggcttattttgtaatgcacagtctctcttttcttgcaggacatgttctctggatgtcagctgagtcattaaagtaactctgcatgtcagtagacagaccttggtagaaccacaaggctcccagagacacccatctctcctcatttttttggtgtgtgtgtcttcaccgaacattcaaaactgtttctccaaagcgttttgcaaaaactcagactgttttccaaagcagaagcactggagtccccagcagaagcgatgggcagtgtgcgaaccaaccgctacagcatcgtctcttcagaagaagacggtatgaagttggccaccatggcagttgcaaatggctttgggaacgggaagagtaaagtccacacccgacaacagtgcaggagccgctttgtgaagaaagatggccactgtaatgttcagttcatcaatgtgggtgagaaggggcaacggtacctcgcagacatcttcaccacgtgtgtggacattcgctggcggtggatgctggttatcttctgcctggctttcgtcctgtcatggctgttttttggctgtgtgttttggttgatagctctgctccatggggacctggatgcatccaaagagggcaaagcttgtgtgtccgaggtcaacagcttcacggctgccttcctcttctccattgagacccagacaaccataggctatggtttcagatgtgtcacggatgaatgcccaattgctgttttcatggtggtgttccagtcaatcgtgggctgcatcatcgatgctttcatcattggcgcagtcatggccaagatggcaaagccaaagaagagaaacgagactcttgtcttcagtcacaatgccgtgattgccatgagagacggcaagctgtgtttgatgtggcgagtgggcaatcttcggaaaagccacttggtggaagctcatgttcgagcacagctcctcaaatccagaattacttctgaaggggagtatatccctctggatcaaatagacatcaatgttgggtttgacagtggaatcgatcgtatatttctggtgtccccaatcactatagtccatgaaatagatgaagacagtcctttatatgatttgagtaaacaggacattgacaacgcagactttgaaatcgtggtcatactggaaggcatggtggaagccactgccatgacgacacagtgccgtagctcttatctagcaaatgaaatcctgtggggccaccgctatgagcctgtgctctttgaagagaagcactactacaaagtggactattccaggttccacaaaacttacgaagtccccaacactcccctttgtagtgccagagacttagcagaaaagaaatatatcctctcaaatgcaaattcattttgctatgaaaatgaagttgccctcacaagcaaagaggaagacgacagtgaaaatggagttccagaaagcactagtacggacacgccccctgacatagaccttcacaaccaggcaagtgtacctctagagcccaggcccttacggcgagagtcggagatatgactgactgattccttctctggaatagttactttacaacacggtctgttggtcagaggcccaaaacagttatacagatgacggtactggtcaagatgggtcaagcaagcggccacaagggactgaggcaagcacaatggtttcaaagaaagactgtaagctccatgattagcataaagcactaaccatgtctccatgtgacccgatggcacatagatgttgtagaataagttatgggtttttatgttttgttttgtgtttttccaaaacttgaacttgcaggcaagccttggttgggtatttgatttatccagaatgcttctctttagggaacaaggatgtttttaatggcataacaaaggcaagactctgccttaatttttgaaaagctgctaactacatgaacacaaatgtgtatttttgttgcagtgtagttttccttttgtgtaattttaaagtcagtgttgaattttattgaaagctcatgatgcgcttcaaagtggcaagtatttggctattaactgccaaaacaagagcctgattttttgaggccagtaattcgtttgctagaattgattttttttctctctctctttgttacataagggcattatgtaacactagccgaatggtagcctctgggttgttgtttttttcttttcctccatgatgttaatgggttatctcaaattttaagttaaactacctaaaataaataccaaagataatgcatatttttgcacagtggagcttacacttaaaagaaaacaaagccccatgggctgccttgaaatcaagagacaataactttgaacctcagcaagaccttgaaccgccggttcattttgcaccttattcagaaaatagagcatcatactcaccgagtctagtcagtgtagtgcttttaaaaattttgtcctttcatgtaacttttttattttaagaggaagaagaagaaaggggcacacacacacaataccgacgtctatcctttcctgctaggcagtgctggccaggctcatgtgtagtgtgcgagatggtgatgtactcttatatttttctgggcttttccttttgcacattccaaaattcatttcataagacaagatcttcataggacctccttggcatcctggcattctcaaaactgagccatccagcatgaaagataaatgggtttaaacccttgctgctgaatttattgcctggactgtcaggacatcaccagcccaccttcaccttagggaagatgccacacctggcctccacacttgctcttctgatcagtctgtctggattgagtcctacagtgtcagatagggcggcaaatgccaaagcagggaaacagggaggtgtggacaagccagtttgatgcagcacttcagatcaagtgcttaggaaggagaggaaacttgccttttttatggcagaggatagtaatgaaaatgtctcagtattttagggtcaatgagagccataaaaatataacataatcacaagtaaaggagataatggtctaaaacagctatttcccttttctgtgtgcatacttatgactgaatgtgagctaagcattttctcctgtggagccctagagcaggttactaaggaaggacacattgttttccagaagcctcccctgcctggctgactgccttgctagaaacataattttttttttctcactgaagctcaataatggaactctttttttttttttttttaatttaaagttccctatttgtgaattctgggattactgacttttctttttaattggagtctcaaaatcaactctcttatggtattatatctctgtatgccattaaaaaacagcttgttctagaatcatgtattttgtaaactgatgtttgtgatggtctctggttcttgaacagccatatctgaatgccgtgcctgcaaaactatgacaatttttgctgttttcagccttcagatttgatggcttgggaaactgaggtgttattttcaatgaaacaaagaaagagatgttaagcaagtggttgttttagatccaaatgtaaaggcaggtttgggaaggtgtttaaagagttggaggaattggggattgagttgtaaagaaaacttacagaagaggcaacaatttggttcttgacagtgagaggatattgagggcttcagctgctgctattatgatgttttgcaaaggaaaataatcaaaccaaagagtattcagtgatatgtaaattaaatgaagatacagtggagaatgggggtgaccacaaaagaggctccccctaaacacacagtgctgccacttaaaaagacttgagaaatttgaaagggggtgggtatggggggggcaagaaagagggagggaaatctttcaacttatttctgaaaaagagaaaaaaatataaaatttctggtgcacaggtttgttttttcaagaaaattttgcagaagctatgtttttaaagtgtacattttataaagtttatcagatattttcatatttaaagccaaatgtaaatagaggtctgtaaagaaaaataattgccatagaaagtataatttcagtgcagtaatttctgagagctagtacctatatgctaccggttagcatggttttagcaaatatataccagccttataaggttcgtattgctatgttcttctgttatttatttcagcatggactgttcatttgaaacctttttctagttattagcgttttaacagttacaagctttaaatggcaattttttttttttttttttttttttttttttttttgtcaagagccaagacacaggtaatgcacgacattgattgctgcattttaccttcaaaatatttgtccttattgactgggtctccttaattaatgtacacatgtcattagaatgcagacggaggggactcaccatgaatatctggggttgattcccagatgtgtgttgcttctctattgcaagcagattccctgttggatttacttcggatttattcccttttaaagaatttttgcccatatctggaagggcactatatttttgggaggagccatagattcctggttatcctatttttaaacaaaatgtagacaaagtgaactctattttgattattgagaaaggagtagttttctatccctctaagagtatacttgaatcagacattttaaggatgtcactatggcactgttgtcatttccaaattcctagaaaagtttgttttactttgtttttattctgttaatgcattctttcttctctttacttcctttcttaccagtacactcctatctcaactctgtttatttgatgagttctgtcccgtaaatcatatttcccttacaattaataaatgtcacttcatattttataataaaccactcagtaaaagcaaaagcttgtcctgagaagtagagtgagttctttttcactctgtgtctaataatgttaaggtgggaaaaaaaaaagtgtggcatagctacctgcccatccccaaccctcagcaaagtagaatctcttttctggtaattttgggtttccgctctgggctctggcaagttgaacaatcctagccattgacaatcgtgatagttattattttcccatttgctgtctttttgtatctaaagtcttcctattgtactgcacaaaccatggattgtacatatttttatatattatgtcttattttattatttctaaataaaaaaattaaaaattgaaaacaaattcttggaagaatctttgggcttcccgtatgattactctagaaacaccataaagcaaatgttcccaaacaatggaacataaaccctgataggttagatgcatagagccatagaaatggcctcaacagacaggtgcagtggggtgacagattagtttaattcaagttagaggaagtcaagctcatattttgtttttggatagaataggctaggtagaaagggaatacaaaagaccaataaacaagccaaaaaaaaaaaaaaactaagaaaaatattatcaagtttagattttgcttctctctttaatgggtgataaggtgtagttgctctttatcgagcctcaactatgtgtagagttcttgcattacatattatttttatctcattcccacagaaaccaaatcaggatattattattttgtattatagactaagacttggcaaataagttctgtaaagggccaggcagtaagtattttttggctttatgaaccagagggtctttgtctcaactatgcaaattcagccttgtaatgtgaaagcagttacagacaatatgaaaacaaatggtatggctgtgtttcaaaacaattttactaacatctacagccagtgggctagatttggcttatggccagtagtgtgttgacccctgttttgggtgaagaaactgagtatgaattttaaagctaatgaatcagtgaggtagtatttggattctggttttacctgcatctaaacctagttttatccattaaactatatatcatttcaggtcacaaagctaccaaggatatgtagtcccgccactttctctggcaaatttgaaataaataaatgtttctcaaggttggaaatacggagaaaatttgcattctaaaatatgggttgcaccttgctcttttttctttaactaatatggcaattattatttatgtttcaaatatgactctaagtcctttctaagtactaaataatttagtcttaacagcaagtctatggaataggctgtattattatcctcatttaagaaatgaagaaactaaggctcagagaggttaagcaccttgtccaagtacatatgggaattattagtgctgagattcaaactgaggccattcaatactaggctgtgctttttgtgactactctatgcgctttctttttgtacatattcttggtaaaagcttcaccatttaagacctttctgcttttcagtttttatccttttcggtaatgaaaatacatcctttttgtttgcacagcatacgttagtgcagaattcttgcctcgttcataactcattcctaaattcctcatttaatgtttggtgagagagaacaacttacaaggagtagagtaattacaaacactggttgtgggatttgggtaaatttcaaacttaagattaatttcaattaacaaggaattgtttaggtctgtctccaggcgaaaccacaaagttctgttactaaccaagctgcaggaacccgaccacatccacacttttgctttctgcccatggtaggcagccaaaggtgtaacacaatcctctgggcaattgagataattaagccagaccggttatggtaacgccaggcagtgagttgcatgctatacaggcctctattttttattttattaaatacgtatacaaaaagaaaaggcaggggtggaatttcagagtccttttgcttggactgtcttttgagtgacaagtgaggcaagacctccaagctctagccttcagaagcagcagcttcccaggtcatacttgcaaagaaaaaaacaaatttccatctagaaatattcattttcaagctagcaaaactgattaaatgaatcgtatttgtttgcccaaatttgagtgagtgaataaatgcataaatgaataaaggatggctagctctatgtcctttaaatgaagtaaagaaccaagtccgtgatcagcttatttcaggacctcagtgtttcttcaggatatttcagaccatggagctaagtgacctaatgattagtcactatctgagggttgttataatgattttataaaaagagaaatatctaattacaaggtagtacctgcaaagcacaagtagaataagaatatcagagtgcctggcttaggaactgggtgtccaactgtcctgatttgcctgggactcagggattttctagcgtgcaagactttcagtgctgaaactggaaaagctctgggcaaaccaggggagttggtcatcctcctttggaaagtagagaagtagaatggctgggggaaaggggaagacccagtagataagaattcgcaagggaggaattgaagcaaggtaaaccagaggcagcacgtgagtgttactaaacagaataataatggtgaataattacttaggaagtggctctctccaactaactgaaatttgtcacctcaagggcattttttttgttttggaggaatggttttctaaaatattatacaattatctgccttattcaaaagatgatatatattatttaacatttccttatgtgactcaagctaatatgtgcacctctttctgatgggatatgctttttaatctttttttatcacgaaaccagcagctaatattttgtccactgccagaagtcccctagtgctagtttgttttctgcttcttattctctgggtcaaataaatcagatcaacccattatgatatagattattgtatcatatatgtcatagcatatatgatgagtttatcatatatcgtcatatcatatataatatagattatcagagaggatatcacataatcctctatgactaatatcatacgtaatagcagggaggttcagaaggcccagaggagacacaaatgacctggcttctgcgcaggttttatattcattgtactgattttcggagatcttttttatttcaggtttgagattatattcggagaggttgaggccattaaggaatttgactttagaaaattctattcaactcaaccaaaaatttgttaagcgattataatgtaatactgggcactcagagttttctttatggacttggtctccaatcagtcacaacttagaaaatgggtggtatggttatatatttattttgtcttaaaaactaagaaaagtaactgggttttagatataaaaagtttgtatagaacagtaactaccaattactgagtacttaggatctattaggcactgtacagacacactgttcttttcctccatgtgtggacatcttcatttggaagattaaatatctttgcagggaggtcactgtggattcaagtgtttttgaaacaccctattgggaatcgttttcagtgcacctcatttaaatattttatttgtgacaaaattttttataactttttggttaaggttaaattctatgtttagaaaaatccagaactcaatcagaaccacatttaagtgacaaagttggataattaagatcgcaaatatcatgtcctacaaaacaatcaatgagtgactataaagaacatgtaattagtgagatggtttggttgtttaattgtcaatggttctgatttggctcaaatgacccaggaggctttacaaaatatgctgcaccgggagagtggacttggattaagtaagcaaccttctgctatgataacttggaaggacatctcaaatgtctataaataatcttacctggcttaaaaaactcctttctctctctctctctctctctctctctctcgctttctttccctctcactttcttttctaattcatgatggtaacttctaccttttgttttgatttttacccttgaattctagataaactatctgcaaacgttcacattaatgtggaagtttggtgagacaaacctgttttctcaacttcataatatcttaaaattaaaatatgtaagacctttaaaatataatacataccattttcttcccctcctagcctccttctagccacttctcttgaaaccatttgccatatatcagtaacagtaaccttaaaatcaacttagttaaaaaacaactatttacaaacataatacttgtatagacacacagtcataatcagaagacatcactttataatctatatttttttactcttacaatggaaattctataggtaaaacagtccctcaaggaaaaattaaatgtttgtatatatttggtttggttttgatagactgctttctgacaacaaacatacacacccaagcaagcttctactgctatgaaaattatggaattgtgaggtaaaaatgttatgacaatttcttggtttagggaaatgtgagaaaattaagcatagagaaactccaatgccagagacatttcaaaaatagcatgtatgttctccttcctccatcctttccttccttcctccctctctccctccttccctcccttcttccttccttccctgtttccttgtttcccttccttctcttcctcccttcccctcccctccccctccctctcccctcccctccccctccctctcccctcccctccctccctccctcccttccttcttccttccttcctttttttctcttcccttgcttcttctttcctccttccttccctccttctcttcctaccttccgcttcccttctctcctcttttcttccttcttcccacacatttgtaattctctatcatttgcctgccactctgtttgttgttgctgtaattagtagtgctcacaagtgactcttaataaagttacaataataaagcatggttacctaatgcaatgtttaacctaaaatttgaaagtgtttcttcttacagtttaagttggttttgtaaggactttgctccggtgaaccctgttctttccctccctcctgctaaatgactgctctgaccccgtattctgctgcgattagttctgtgaatcatcttcgcctcagcatttccccagtcctgacacatggacagaaagacatcccttggcaaacattcaatctagtacaacaaacaaatgaatcaagtctcagcctttgtcattttacttggattttgtttttttacatttttgctaatacagttttacatctaaagtcccagttaagcagctcttcatttggtcctgcaaacagagtgtctcgtcgaatagtatataggaggttcctttacattaggaactttctcataaaaacagattatttaccaagagagaaatttcaaaggcaagtatacacacatttctaacaaaacactctcggcaaaagcactgtcagatggcaaccatatatgacaaaatgagggaaagttgaatgaacatgtcagaggttttcttcagtcctatcatgagttcttttggtggccataaggtcaacaaagcactcctccctgccttttccagggaggagctgaagtggcagccagcatcacttgggcacactcagtcaatgaggcagctgaataagatgcccccgagttgccatagaaactggaagaagcagagaagcaccttctcctgcacactctttaatttcatctgagtgactttgtttaagaaccaaaaataaaaagtgcacaaggatgtaattatataaaaagctgtgttcgattataaatacagtatgtacttttgcctcagtctacagctcacctctcccttccatttcgaggcatttgaaccattcaaggaggagtcttcacttcagctttaattgaaatgaggcccagatttaccaagacaggggagcgagactttctgcatttctatctttccctggttcacatttgacgtctgcatgtggagtcttttataacaaagtctatttccaggggatcttcatatcgggccatctgggttcaccagggcttactgaaattgctctgccttttggcatttgtagtctaaaacatcgtataggtttatgatcattttgcaggataataaaaagaggtggacaggagaatgccaaaaaagcaattagtggagaagggcaacaaaatccttttttaaagaaatcctgttgctacttgcaataaacagctagtttcacaatagagcaggatgggaggagagtacctcaacagtggtcccattgcagtgttcacctgggggaaattgttcagaatttagagggtctacctctggtctttacaccttcctgaagggctgatgggttaaatttgctggaagaaaatgacacatcttctttctagtatcctttagtgaaacagggcaatcctgaacctgcatgaatcctggcatgatttgaaatgtacttgctcttaggttcctacttcctgctagtgatttgcatgaagttgagtgcaatatagaatttacttaaaaaggaaaatgcaaaggtacaaggtgtgtccaatgagcaaaaatgcaatcctatgtgttcttcgtgaatatgccttgtctgttctcttgatttggaggactacacatgagaacccgagactgagactttctgcaaggcaaataagtcttttgtataagtaaaatatgaaaggatttttccctttttggaaagctggcagcctgcaggtaaaaaatgtggctggttcagctagtgctgtttgtaaaactagactggccatgtttcttaaatgcctactgaaaccagttacatgcttgcaagcaaaaaaagaaagaaaaataatggaactgaagaacgtccttggctgtttaaggttggaaaattttacttaaatgaatctagaatttccagatctttttacctagaggtacataacaaccacaaaaggagtttcctcaaatatagctttaaatgtcagccgtgtcctcttcctggctttgagttcagatgtattgtttctggtgttttgttttgttttattgttgattgtttttggtttttgcctcacatcaacccacgatgaaaactcaactcctcttagagtttttccaaaataacatgaaaatgcattattaagaaatgttggttttatagaaaattttatatggaagacagaagaggggttctctgcacaccctccacgtgaaacatcaaacttatcttgcaagttggatttctacagggatttcgttctcttatctctcaccaccaagagtgagatttactctttttaccttttgaaatccaataaggtgctgggcaaaacaagggaccctgtggttagcaaggcccttgttgttagaaatggtcagctttaaaatgccacagattaaagaaaaattatacaataactgtgccactaagatgcataaagtaataaagtttaaataacacagtccagcatttgcctccagtctcaaaagctcaaaagtctgattccatcagcacatctggccctaggagccagatgtatggacttaaaatatttatttacaatgagaagtatgaatgctaaaggaaccacacacttgaagactacagtcagtgtatgttcactgtctgtgaatttttcatggtggttgggaatagagcaaggagaagtcacgtgaattaatcgtaggattgtaggatgttagcaaacaaagacagcatctttcatctaactcaactgggaatcagactaaagaactggtcatgttgaatcatcagatggaactctcttgccctgaacaatgcttggatcagcactattcattttagcttgtgggattcttctttcagatacttccaaggccgactagtatcatcattctctgttcccttttaattaaaacattctttacttacataagtgaatatacacagtccatttgaagttacatttcagaggtctggaaatctttctcttgtttcatctgtgatttttttatataattatctctttatggtatattttacatgcaataaaatgcacttatttaagtgtacatttctatgctttggataaatgtatatattcttgtaactattaccacagtcattaccatcatcttccaaatttattttgtaccctaattcagagaatcctcccctatcagtcccacccttggccccaggaaaccactgacaaagtaagtttaccttttccagagatttcatcctatctttttttctttttttttgattccttgatctttattttcttaattgttaaatcgatacattgtcattgtacataagtatggagtacaatttggtgtttcaataaatatctacgttgtataatgatcgaaacagggtaattagcttatacatcacctcatgtatttaatatttctttgtgatgagaacatttaaaagcctagccctaaaactgtcctcataaaattaataaaactaaattgtcagttttcttaccaaaagcataagctttgagtagaagcagggctaagcattaatcaggtttccctagagcctacttctttctcgcttcctactacttaaaattcacgtagccgcatcacaagctcctggcttctacagacaacgtctttaatgttaagaaacctcagattctccattaagagatgttttccagatcttgcattctaaggatccactgacaccagacagtctgaagaactctccgaggaactaagtgcaacaaggcagtttctacatatttatgattttatctcccatgccctaatcagtgacctcctgcttctcagccccatacgtgccaaacttttcttaaaaaacacagtccaaatctcctcaaggaggcagagttgaggttctctcctatctcctcatttggatgcccctgtgattattaaattctttctctgcggcaactcccgctgtttcgacgtattgaattgttactgctcgatgagcccttgaacatggcagccctataacaccttctagctatgttgcaatatacaatactttactcttaaccatagccatcctactgggcattggacaccagaacttatttctcctatctaattgtaactttgtacccaccgatcaatctctccctatcctcccctacccctactaacccctccctagtctctggtaaacactcttctacttgctgcttctatgatgttacttttattttagattccacatatgtgaaatcatgcagtatttgtatttccatgtctggcttatttcactaaacatgatgccctccaggtccatccatgctgccacaagtgacaagatttcatttttttttttaatggttcaatagtattacatggtgtgtgtgtttctgtgtgtgaacattttctttatccattcatctgttgttggacacttaggttgatttcatatcttgactattgtaaatagttgtgcaataaacataggaatgcagatatctcttagacacactgattttatttcttttggatacatatccggtagtggaatcccaggatcatacagtcgttctatctttaattttttgaggaaattctgtaccatttatgtagtgattgtactaattttacagtcccattaccattgtgtaagtgcttgcttttcttcacgtactcgccaacacttgttttctcttgtttttcttgataatagcaattctaactggagtgaggtggtatctcatcgtggtcttggtttgcctttccctgatgattagtgatgttaagtatttttcatatacctggtggccacttgtatgtcttcttctgtgaaaagtctattaagatcttttgcccattttttaattgggatatatatatgtatcccaattttgtatctcccatgccctaatcagtgacctcctgcctctcagccctatacctgccaaagattttttaaaaaacacggtccaaaactcctcagggagggagagttgaggttctcaactcgagtacatatatatttgctgtccagtttcttatacaagtgaatattaatcccttgtcagatgtaaagtttgccaatattttctcccattctgtaggttgtctcttcattctattaattgttttctttgctgagcaaaagctttttagttagatgtaattccatttgtctatttttgttctgttgcctgtgctttgagatcttattgttaaaaattataccaaggtcaatattatgaagcatttcccctgtattttcttctagtagtttcatagctttgagttttacatttaaatctttaattcattttgagttaattttttaaatgtttgagttgatttttatatatttatgtatactccaagttctctttagattgcatgcatcttttgtctttgttattgtgtcttttaaaggacctgcctatctctgttttgatgcagcatgccttgattttctctctaactcttagagaagaattttactaattttcaagattttggaaattgagtgctcaatatatattacttctgtccagctccctacctacttcctggtccagccctctggaccactgacaccttttttgtttggtagcacaacttttgaaaaaatataattttgattatacacgttaaatataatcatatatatacatatatatgtacatatgtatgtctatatacatgtgcacacacacgtgtgtgtatatgatttaacatatattcttcctaaggaaatctacaattctaagaaattctcagatgaacttctacaggttttgtgcaacaggtttgatgtctcccctttttattttgtagtaaatatatttagttccacttagtaaaatgttatatgcaagctcattcattttctacagagaaatggctgtgaaaaaaagcggccttccccaagttccttaaaaattttgagccttgtttggctcaaactagaaaataaaaataaaaacggaatttgtgagatttaaaagaaaatagtttatgtaaaagtgctttacaaatgatatagcactatatatattattttatacttgtagtagcaattttttattttctgatatagacagtttttaccctaaattccaaatacttaagtccatcaaacagcagcaacaacaacaaagggcttttctcattttgaaaaatgcttaccaagcatccaatgcctagaactatgagaggtgttggagattcaaaggtaggcttgtcaaggagctctcagaggcatgagagagaatgagaacaattacagtaacctaattttgagtttctatgtttgtcctctgaccttagcaatcaaggcaaaagacctccagtaaagtgtttgtgcagtacatgtaagcacactcttctccatccttgctgagaaaatccatagtcacattttatcaaatgtcaagaggtttcactcttttttttttttttttttttttttttggtacttgagtttataaggctggagtttatgcacctggaccctggcactacgtgaagggaaggtgttgttcttggcaaaatgctcagtaacaagcctatcggattacagagtggatttcctttatcttggggcattggactctattcagggagcaggagggataagatttcacagcttgtttggacatgctagttacttcttattctcattcttctgaagagtgtagtcttctggcctacatcctagtagaatcaatgtccagacaagaaatgccttcagtgttttagatgctctctgctgaaccaaatgactttatttaccaaaaacaaaactactgccttccaataggaaggaggtggcctttcccagaacttctagccaaaccagagtgtcctgctgtttgacagaggtttagtagtgtttctatcaggattccttatataagaaaaccttttttcttacattgtgtccaaggtggttttttcctcaatggacttcaggggattcttttcctactacttctttaggtatattttttcccttgctgttttcatcacttcattctgcaggccaaatctttaccaaatattcatgtcactgaaatctttctggcaaatctgctaaaatgaatcatttattttcctttgcaaaaatctgttaaaaagaaagcagtattcctgaaaagaggtttgaggaggttcaatttttccatcacttcaccataacacatgcagacacagacacacacacacacacacacacacacacaacttctatgtgtacatgcatgaaactaaaggcacaccatagcgattgtcacagtcctcattcttgagtctctcttgtgactttggtaagatcaaaggagaaattcagccctgaaactgtagagacatcacacaatttggggcatttgtcctgatttatttattgtccattatatgtgttataattactggggaggaaaaaaataatgtccattatatgtgtcataattacaggggaagaaaaaaataattgtaggtgattcttatttcttctccaataacttatttataattttaatattttctacaatgaaaatatataactttttgtttcttatccatgattgttgagttaaacacatagttgatatttcctatactcttttttgttcaataataaatgcactaaagtctctaaaatattatctgagtaccattttgaactaaaatcataggtgttggcacgttgcattctcatggttttcaaaaatttctaagtagtttaatagcccaaagattattttaaagaacattttaatacatccagttggatatttatttattgttttgttttatttttgtgaaaggaggctatctctttccttttatttttattatctagttttattgaactgtgtcagaaaatatgaaatatattattgtatttaaaatctaatggccaactttaataaatatgtcatggctatttgaaattaaagtacatttccttttgttaggtacacattttaaatatctatatggctgttaactgtataattcaaatattcaaaagtttaaatactttttatctgtttaatctcttgagtattgaggtaagtatgtttaagtctctaccatgatggtttaatattctatttttacttgtatggcacttgcttcctgtatattttattgatattttattaggtacatccatgttcatgattgttaaatcttattagagtattgtaactttaccaaataaaataaccctctttttactttttatctcagattattttttgtcagatgttaatatggtaatgctatttcagttttcttggtattggtccagtataactttttttgtcttccttcatttttctacgtttctatgccatttttatattttaatattttctacaaagagaaacatgaaatttgagaagaacatttataattattataaacactgacatgttttgtattttcctttcttctttctttctttcctagtcattactgtattgacatatttgcctttattttttcttttactggcttataaatacacttttttttattttagtggctgtcttatatttacattgtattaaaacaaatcattctgaagatgcctatgacttgttagcatttatatctattttcttcactaagacgaaagcttaacatgctttcaactctctctcctgacttcacattcctaatcttagaatttctgctccctgtagtacatgagaaaaatcaacatcaaataaattttagatctttattttaaacttgatgcaaacttattatgctatcttaagatggaacagaaactaccatattagagtaaacatttttattgtttaaacagaggatctctggattaagttttacatttcaagaaataggtcaggttgttaatttgatattgagtgcagctgcctttcacaatctggtcttgagaatccacaacaatttaactttcactaaatatggcacgtggtaaataaccagtctatatgaacagatcctccaaattttcctgataagctcagatttgaggacccccacactataccaaacccagatagatgggccctatccccagaggttttttgttttttgtttttgttttgttttgttttttgagacagagtctcgctctgtcacccaggctggagtgcagtggcgcaatgttggctcactgcaagctctacctcccgggttcacgccattctcctgcctcagcctcctgagtagctgggactacaggtgcccaccaccacgcccagctaattttttgtatttttagtagagatggggtttcaccgtgttagccagggtagtctcgatctcctgacctcgtgatccacctgcctcggcctcccaaagcgctggcattactcagtacattggggatgggcctgaggatttgtatttcgaataagtttctaagctgtgcatatgatgctggtctgaagaccccacatgaggaacaactagtctaatgcaacaaattctgagcaggccccgtgggtaagagactggatctaccacctggggaaagccatttgtccttccaatattcctattcccgttacctcaagtaaaggggacgatgaaggaccagatggctcctaagatccagccagctctagtttttgtgtatgttcttttctttctctaaagaggctgtggtttattttctatcacatttgataaaagagagcatcatataattgcatttatcagtgagataactttgagctaattacataaggactattactttagtacttatatacccataaaaatttcatacaagaagatccaataggcttgttaggggcaaaaaaaaaaaaaaaaaaaaagagagaaagtaaagttcaagcaaaatatagagtagcttacgtaagtcaggctataaatatttatacatttaaataaaggccagaactttgcttctgtgtttaattttttagcagccaaattaaaagaaaaatgtaaaaattaagataaatgttttaagaaccatgtaaagtgttgggcataaagatgggaacaacagacacaggggaatacaagaggggaggaagggaggagggcaaaggttgaaaaactacctattgggtattatgctcactacataagtgacagatccattcgtataccaaaccccagcatcatgaaatatacctttgtaacaaacctgcacatgtaccccaattctaaaataaaagatgaaaaacaaaaaaccagaaaaccccaaagtaaatacagaagtaaataaataaaaagaaatatgtaaaatgttatgtcattccaaaggaaaccacttgtattaagggacagtggttaaaacaatgagaggactttggtaataaggagccttgtgttaaaccacaaatgatggatatgactttaataggtagatgtggtagggaagaccttccaagcaaatggcccactacaaacacacatgtagacataagaaacctaaagcatatcttgataaccacaagaaacccattttgtctagggcaggaattttgccccctgggaacatttcacaatgtttgaagataattttgtttgtcacaactgggcagttggtgctcttggcatctagtggctagagaccagagatactgctaaactttctgcaatgcacagaacagaccccaacaacaaaaaattgtctagtccaatatggaaatagtgcctccttgagaaaccctgttccagggaagctaaatttagacgttaatggggaatgcaactggaaaagtagcttgcagattttaaatggtaggccaaggaaaagttaccagaaatagaaggttctgagcaacgactgaagtttttttttttttttttttctaataaccatagtgccttgtgggaaacttaagtgtcaaatacatagagatggctgggcacagtggctcacacctgtaattctagcactttgggaggctgaagtgggtggatcacttgagcccaggtgtttcagactggcgtgggcaacacaggaaaactccatctctacaaaaaattacaaaaattagccaggaatagtggtgcacaactgtggtcccagctacttaggggattgaagcaaagggatcacctgagcccaggagtcaaggctgcagtgagctaggattgcaccactggactccaacctaagcgacagacggagaccctatctcaaaaaataaataaaataaaataaaataaaataaaataaacaacaacaacaacaaaaaacccccacacaaaacatagaactgattaaaggaataaaatcccaggaaatgggatgatcaattaggagcctatggcaatatttcagatgaggggtaagaaagactttagaaaggaaaggcaatgatcaattccagagacatggcagaagagaaatgtttatgactcagcaactgtttaaatcatgggaagagagaaggtggctggaaaaatcacagcacggttgaattaagaaacagagtcaggagagaagagtgaactgaagaggaacaattatactttgatttttgaggtgtgggcaggtcatttataggtggacacaccaaataggcttctagaaggcagattgattcaacttgctatttttgtctacattcctgaactcttccatttgagttgaatccaagttacaagcctcatttgcaacaacataatcttttcactctcaggtaagggtgggggcacaggctttgcccttaagagaaattcaactagtggggccaactaattcaagtctcatcccagcagcatagtattggagttcactaaatatttaacaagagtcaaaaggagtaatgttttgtttactatcaattgtgtttgcttttgtgtgcagcttccatgatcccagggttgtaaacttgcaagtcacatctgtgttctgggcatgagctcacatttatgtaaatcaccttcacatgctgctacaaatccactcaagtcaacggtttagcacatcccaacatgcacattggagaggtttccatgaattacattctttgttttaatccgacattgactcattcccatgtatttgccatcactcctgctgcaacttgacacacagtgctttgttagccttgttttatatgtcttactttatagctggtaaagattctttctcccctcctcttacggcatgagtggaagtagaggaggccaggagttaatcactgcccacagctgatgtatacagcagccaaaagcaggcattttcatatgtttattacaaggaagtatagccagttgaattccctctgacttatgcagccatgaatcctccactgtaggatttcctcaaccttccagctccatagaatcatgcaatgctggccgggtgtggtggctcatgcctgtaatcccagcactttgggaggccaaggtgggtggatcacgaggtcaggagttcaagaccagcctggccagcatggtgaaaccctatatctattaaaaatacaaaaattagctgggcatggtggtgcacacctgtaatcccagctattcgggaggctgaggcaggagaattgcttgaacctgggaggtggaggttgcagtgagccaagatcgtgccactgcactccagcctgggtgacagagcgagattccatctcaaaaaacaaacaaaacaaaagaaacaaacaaacaaacaaaaaaataaagaatcctgcaatgctaaaatccacgaattctactcattccaactacattcttgccatacaatttaagtctatgctacaaagagtaagcatgatataaggcaactaaactggtcagttgcaaaacttccttttgtctgtcctgtgggttttctgtcaactgagttattaaactgctataacagtttcaggagtacatctattccatgagttttgtcggctaggtggggttctgtactgaaggtctttaaggtactcctccatatgcccaacagtcaaaagtaagaagaagaacataaaccagggtgatccaccgtgaaacctgctgagagaatgttttgatgtgaagcccttcccagaagtgagaatgaccaaggagaaattacctccttctagtctctcaccttccatctgccatgaatgaagcaactgccaggcagagagactggtcattgccattggtctgccatgcttggtatggacatttttttctagggacacatcaatccctcgcctgaccccagatcctgagaaacatcttgtgaggttatacctctttcacaccattgaagaatctatctcttcgatatttttgaatggcttccagaccataagtcgctcctttgacactttcatttttggcacgaactgcattatttccatactcagaggtttacagtaaccaacagcaaatgttctgcaaacagaagcagaaggtaacttagtaggcggtaggaaagaccaagacaagttttatcaaccccacaattctccagaaccagccctgattctctgattcattttaagtttgtttgaaaattctgtttgaagaagacaaagaattattaaatacaataaaaagtaggatgtttagaaaagaaaacaaaaaaccttggattcttggaaagctatagaagaaattgagattctcggtctaaaaggattaagagaatacctgggcgcatgttttatttaatatctagacttatgtgcagacaaaagtttccctggggctctgggaggaagttccaggatggtaaatgtaacagattaattctatagggcctaaaaaaacaaaaaaaacctttagaaattcttctttctttcatgtaagaccaactcagtcatattctttcttcctacttgtttcagcaattggaaacatcttcaaactcattctgtaagaatgatacaattttcaagagatgaaattaaaattatgccattaataatatcttagatgtatggcatgtattttcagtggtcttcctcacccagtgagtgcttctattcagattttgttgaaaatgaccactagggctgagttgggaactcttgcctgttggtacctaaaaagcctcctagtctgactgctcctgggaatcaccaaatgtgtttcccaacttttcatgctatacacatgctttacgcactcacatatacacagaaacactacttaaaattagctctgttaatgtctgtgttattttccattctgtcttcaacaatttccctatcacgttcttccctatgacagtcttggatgaaaaaggtctacttgatgtcgtcacatatattttcacctaagaatggaaaaggaatttttttttaatttcaacttttcttatagattgaaaggcacacgtgcaggtttgttacatgggtagactgtgtgactctgaggcttgggtccctaccaatctcatctcctaggccataagcatagaactcaacaggtgcttcttcagcccatacccgcctcctaccatcttctgtctagtgacccccagtgtccatcgttcccatctttacaatcatgcgagtccaatatttagctcccacttataggtgagaatatgtggtatttgattttctattcttgcgttttgttgcttaatctcctccagctccatccatgttgctaccaagggcatgatttcattcttttttttatagctgcatagtattctatggtgtatatgtaccccattttctttatccaatcaaccgtcgatgggcatttaggttgattccatttgtttttgctattgctattgtgaattgcactgcaatgaacacgtaagtccatgtgttccttatgacagaatgacttattttccttcaggtatatactcagtagtgggattgctgggttgaatggtagttctattttaagttccttgaggaacgaagtgctttccacggtggatgaaatagttagcattcccaccaacagtatacaaatgttcaaacagggatttgttaattccatgatttaatgaaattacctaaggtttctactaaacacgattatcatttgacatccataattagtaagcaatgtaccctaaggactttaaagcaatttttaaataacctatggtaatctagaaaccattagaaagtgtgagtcattatttcaggccctatttataaggaccctgactaccttaattaaaccaaatgaatctaaactgtctcgtgttacacaattcattgtatcttaggataaagatacacattaactaaataaacttcatctactatattcaccagataatgagttagtgaagtaattaaacataaatatttttaatgccaaggaaaatgaatactcaaggccaccaacccagcattcggcaatcttgttaactttatgtcttccttttaaagaattacaggaaaggttaaattgttcaggataattctggataatatctgaagaaactgtaataaaaacatcacttgtgaaaggggccaccatgatctttgaaaaagtatggtcagtaacatggttgtgaattttaagtactcctgaccatttgctctttagtgagtagaacaatcactgagaactaaataattttggctattttataaaaataattcaacaaataataaatactgatttcagggtaaagacaaagctttgttacaaaaactacaacttgaatttatgtatgtgcaatgtcagttaaattttaacagtggcttgagtctaggtgattttaaagtttgaatataaaatcatgaaggactcaaaaattaggccttccacaaattttaataattggcttcaccttgtttattcctgtcttcatatatatatacctttatttacggtgcccagaatgaagggttacctctcacgtggatgtacatttaaatatagtcatataatacttttactactttttggtaactataatttttattcttttcctgtatttaatcaaataactttttttttttttttgagatggagtctcgctctgttgcccaggctggagtgcagtggtgcgatttcggctcactgcaagctccgcctcccgggttcacgccattctcctgcctcaccctccagagtagctgggactacgggtgcccgccactactcagggctaattttttgtatttttagtagagacggcgtttcaccgtgttagccaggatggtctcgatctcctgacctcgtgatccacccacctcggcctcccaaagtgctgggattaaaagtgtgagccaccgcgcccagcctagtcaaataacttttataacagcaacagcaatgaaataaaaacaactttgctatgtgccacacactattataagcattttacatacaatatagtctcatttaatccttaacaaaacctttaaagtaagcattaccactaccattttgcataaagaaactgagtcagagagatgttaagaaacctgcttaaaattaaattgttactgagtggcagagccatgatttaacccagatctttttgactccagttaatcctatccactatgttatactgtatagaaccgctatgtgtgtctacactaaatgggggaaatgataattctcttatttgcaatttatctgggttgataatgatccatgtttaattttttgcattgtattgtgagtccctgatcttcttgttttcttgtcctacaaggtatagtcttctttgaaaaaaattattattaccaaacttctataataactctcactttccgtatgtgtatatatctggccctcaaaataatttgtggcaattggtgagttatacaattgacaattatttgtttaaatcaaaggagacacaataaatacaggaaacaatcttcagaagtcaatttaaaagtctctaggaataaataaattacacagtatcacaggacacatacaaaagaaactttcaaacaccagctacaaacaccagctaagtggagatgttacatgcattgcaattccaatgtatagtgcagctgtttttatgaagttgatgttcacaaagttaaaaataattgccagaattaatcactgaaaggctaataacctttaagaaatatgtaatgaattgttttgcacacatttttatttttagtttaaataactttttttttatattcttcagtttacgcctattaaattcagggcagacaatatattagctgaacccttaacattcttaggttgagacttataattcttatagctgtatgcagctcagcagggcttcattaatacactggtatttaagtcattaggtttattctactgtgtgtaaataggcagcggaacagttaccttgggtaacatttaagtgcaataaataactctacatctatttaatctgcctaatcggtgtttttcaaaggaatggcagcgtaaaacacttttatgtggcagtctctcacaagacaccccaaacaacaaaattaacaagaaaaaaaaaacaaaaaaccttgcccagtgaaatgaaaagatgaacacagctgtgacagtgacagtgatgagtatctgccagacacaaagaaagaaggatcattctgcagaaggccattaaaagcaagttatatcttgatctcaagcaaggtcgctgattttttttgcttcctaaaagccataaaatcaaacgcccaacctatgaccattttcttagcaaatcaaaatgtagaggtactagctgactaagggaaaaatcacatattcacttaattctagagccccatttccagccacagagtatcacaaaagcagggagaaagggcacccgagcccatttcccaagacttaacattctaactcagaggaaggtcttaagggaggtagcggaggataagcagaaagtcagcgattctctttgcagttctcaaaatcagactaatgaaaataaaactaacaataaagtacttatggagcacagaacttgtgatagaccagagagagaagatcagaaaaactaaggtcatgctcccagagcagagagaagacaaagattatttgagaaaatgatctgagtaggaaaccttttgtgggagagggcaaactgacactaccacaaagcctgatattaactaggtgctcagtaaatattccttgaatgattgacagaagggaagaaaaaaggagggaaggaggagggagagcaggcagtgacaagcaagtggctgtccatcatttacccttcctttttaccgtgtttacactcttgccacatatagatgcagtctgttccttttttggtttttctaccaaacatctagagtccatgtgatattctgggtgtatctacatctgggccagaatagtacattgtgttctatctttaactcacaggacatacagcaatagtctaagtctcctgaaaagccctagaatagtcaacagatataatttctctttcacacttttttgagcaatcattaaaaataaccgaagcaaatctaatttcagtgaaggggctatctttggatgccatgagaatgtgataggagaatatgtatttacattttaattagtgtcaaaataaatatttttattggtgtcaaagttagaaacactttaacttttaaacccatgcattctaaaagtgacatagagcttactaatactttatagcgtttcctaaacttcgtttggcttagttttctcatgtgtaaaatggtgataatagcatccgccacgcagggctggtatgtggatacaaagaaaaaatttatacaaagcatctaatacaatgcttgctacattgtaggggttctaatttctcccattttagacaaccctaatttattaatattttctgtgtctgtctttcccagaatacaatggaagagtattttttaaaccacattaaagaaatttgaaatctacaaaatttagaaagtaaaatctaacatttctaaaatgtttgaaataattcattaaacgtcaaaacataataccgaaaaaggaagggtcatctatctaggttgaagtttgaggttccagtttgtttttttatagttttaccataattcgaacttgaacttttttttctctgatggagaaattctctgcaaacctcccctggacacagagacaatgctgtaagcagtgaagccagcttcaagatacctgtacttcaaaatgaaacagtctgcaacttgcttgtcagtggttcatggaacagttctcaaccaggacgttaccattctccaggaagtgtttggggatatgtgaagatgtttttggaagccacaaccatggaaggtatttctaatatttattgccagggagccagggatggtatactcctgcatccattgccatggagcctgtaaatggaaaagcatcccatccaattcgcacacccatgcattcaaaaatattactatactcacatatgcctatgcatatgtgtagtcatatttttaaatatttatatatgtgtgcaaaacaaaaacaatatctatttcaagatgttaatataaataaacatgcagaatgattgatgcccttcttaacagctgagggtcttaggaattaatcttgtcttgctgaacgttgattctcaaataaattgttctgcaaaaatgcatcaccttaggagtagtatgacatgccctgccatgccaactcctattaaatatttagactggcaaaaaatatctaagagtcatgtaatttgcttttttttttttttttaacaacaacaaaagaaaaccctcaagttttaaaattctctctcgaagaagccattgtcagaggccactttgggttgggtaggtagtaaatctgtgtgtgagcctacatgccatgcatcttctttaggaatggatgctttttaaggaaagatttttgtaggtggttcttttttgttctgacattgcatttatattcggctccacccccacggtctttcatttagtggcacttgcagaaagccaactcctaaaaagatgtatttttccttgtcctgtactggggtggaaactcttcttatttatatacactgtcataaacagatgctatagaaacataaactctttttttttttttttttttggtagcaccttgtcttttttcctaacctcatgcagacatgaaggaaactatatcctgggaaaatggaagatggcaacacattagtgaaaatgtcattggaaaggtgcactgccccagagctatgttgctgaaatttctaagcctttctttaatagccttcttgggtccctaagcagggaggttttggatgaattctccccagccgtggtatgccattgtctgattcttccagccaaaatttacaacaacaaataaaaaacagtggatccttacgagaaattttttcctgggaaagccatatattgtggaaagggggaagaaattgtaacatggaccaaactctttcaggtcattcagagtatctattgtagcaactgaaaagctccaaaccagtcaaaaaggtgtttttaggtcagacatacattatcaaacattcgcctacatattattagtttatttatgagaaacaaatataaagatgcttgcatgtatttctagcagtatccatataattgaatgctttactttttagcaaaaggactgtctttaaattgagtatgagcctaccttccccagagtcaaattctttattagacatatcacagtattttcatactcatattctaaggcagatatggagttcccgagatcacagaatgtcagaatttactcaaacatctgcccatgcccctgggcgaagttacatcaacgatcagaaattatgttccatgtttctttctctttctgttctaccctgttttcatattcagttacacttcctggttctattgaatactggaagtgccaaaatgtggcaagaaagacaagttctagccttaccagaaacaagaagtatttagaggtaagactcgtattgtgaaatttctaatccagttgcacaaatttaaaagtttctaatttaaacttcccctacataatctcatgtgggaaaaacctgtgcttttgatgtaatttaatgaagagaggttaactggaaagaggcattaggaaaaacatggaggacccacccaagggtaactgggggtacctcaggggcctgccatctcctgctttgttctagtcacacgtctcagaatatgtctggcattctgggctcaacaatgtgacttatgtgacttatttctttgttttgttttgtttgagatggaatgtcactgtgtcacccaggatggagtgcagtggcacgatcttggctcactgcaatctctgcctcccaggttcaagcgattctcctgcctcagcctcctaggtagctgggattacaggcatgcaccaccattcccggctaatttttgtatttttgatagagacagggtttcaccatgttggccaggctggtctcaaactcctaacctcaagtgatctgcccgccttggcctcccaaagtgctggcattacaggcttgagccactgcgcctggcctcatgtgacttatttctcaaatgttaaatgaagtataatatctatttttataaacaaatatttataggtatatcaactttttccctcagattatacatatcattttaaaactatggtattccaaaacctacagaagtcatgggcttaccacagtttccaatttggtagcaaacgagactctttgaactgtgagcataagggtttgtttttgttgttgttttgtttttgagacaggatctcactctgttgcccaggctggagtacagtggcacgatcatgactcactgcagccttaacctcccaggctcaagtgatcctcccaactcagcctccatggtagctaggactacaggcacacactaccatgcctggctcatgttttgtattttcatggacacgagatttcgccatgttgctcaggctggtctcaaactcctgggctcaagcgatccacctaccttggcctcccaaagtgcttggattcaggagtgagccactgtggctggtcctataagggtttatttattgcaataaaaaatgaacgtgtcatattttgcctgtaaagaagtttgcattaaagaaagaggaagtatcatcttccagcagtgaagtattaagatttaaagcaatattactacttttcaccttcttatccaaaccaaaccagatccagatcctgtgaattaaaatgaccagaatattagcacccttaattatagcaatctgttcctctctttttgttttccatggattctgtccaacccaggaatattatgtttgcattattgctatagaatttgcatcaaaggcatggcttgatttttcttttttatgttctctggaaatctcaagccccaatgactaaaatcctgaaaggttttaagtttttccgctagttaatacagtaagaaattagttgcatctacatatttagattattgtaggaagtcatacacaattttcactttgcaaaacatgattgtgtagacagaacctcatgttccaagtaactgtttgtcgttaggtagctagtatcatctgttcatctagcactcttggccttttttactctttaaacacagagcttccaagaagagttatagggcagagctacaatgcagttatttattccagccctctcacaagacaactatatttaggatatgatttcaccagtcttagactctgtactttgtagtctggtacataaacacaattcaaatgtcctcacaattcttcatatgagcaaaaagagaaaacagatctgagttagttctataattaaaattattaaaatataatatcagatacaatatattatgtgtgagtgtgtgtttgtgtgagattcttctaaaaatatagcaaaatgttgacagtgctaatctctggaaaaaggggtcatgaataattctatgctcttcattaaaactgtatgtattttacagattttataatgattcacatgctaccattattggaaataaataaagacttagggtgtcctcagtgatatgcaattaatatttattctctgtctgaaactctcaattttgtaatcagagcactaaatgatttattaaagctgtggactgcttttcaaccaacagaagcatagtaatatacgatatatagcaaggaaggaagacaaagccacagtgcaattaggcaaaggcaaagaggtagttacaaatatgggacatattttaagaagagctgaagccactgagcaaaatttgttcttgtctagggaaatgatgttaatctacagttagtcttttaagggtggtacctgaaagtatgaacatgactttgaagatgaattcctgttttaatgaaaaacctgggagtctacagaagaagactgcagtggtttgtggagactcccagattgtctattaaaactgtaattcattcttaattcttccttctgcctcgacacccagtcattacattttatcagcttcacgtccaaatcatctcaagaatcttcactgccttcactcccactgtcactgtctgaatagagactctcatatctcaccttagccacttcctccaggttctttctgcctcctgccctgctccaaccagcacattttccccctgtggctgccagctttattttctttaacataaatctgctgctgccactctcctacttaacaaaaccttcagcgtctgctcatcaccacataataaatcccaaaagttatcactaatccaccttcactcacctccgttctgtttgtgctccaacattttttctatttcttcaactataatgggtgctttcatgtgtccctgcatttgtatatgttgattgttctgactgaaggcccctcccttacctttcattcatgctgggaaattcatgctagctctactgaaatcattttccttacttccttgagtagaatgaattggctcttcatttgcacccccacagaacattttctaaatttaaaaaatagcactatttgaaaactgagaaatggcgcccgatattcaggatacacagcaatgcctggaacagttacgatgagtaattgtttaaatttaacaaacactgatatagtacttatattcaaggttctgttgtaagtgttttacaaagatcaactcatttaatcttcatggaaactcatgaaataagtactattagtattcccacctaatagaggaagaaaacttagttgtagagagtttcagtaacttgcttaaggtttcacacaggccaggacttgaagctagacagcgcagctcttgaatccatggccttgccaacttcagcactctgctatgcccctgaaataaatgacagtcatcagggcacacgcatcagtagaatttcagactaatgaaaatgcttcaaaggagttagtaggatatcagccttctaaggtttattcttcattaaaccatatagccacagaatgtggtaaccagaagtttcctttgaaccacaatgcttgattcaggcagctgctcagagtcacacagctttacaatctcttcattcacatagtgcaaaaaccagaacaccctgttctcattgaacctagtctctcccaacgtggaggagatagccagttctcattaagctttatgaagctacaagctaaatggaactcaggttgcttggagaccaggtgtccttatatctttcggttgcccagggtatttcctggggcagagctcaagagttgaaagtccacagcttggggggtaacgtttttctttctgaacaaattggctttgatgtggctaaatcggttccaaatattgaggctacacacaagccatggtctttggggatgtgtttattctctgatggaatagcagcacttcatagttaagcaccttggtgcttaacttagcttaatggttaagagatttggactgtatgtaataatatagttcagaatttagattattattcctttgataaatactaagtttaatgaaaaaaaatcattgttttacaaatctagactaatcatgcacttaatgtattagctgttttattttcttcagattacacaagtgttatacagtgcattcattatatgctatttaaacattacagaaaaacctagcatggactagaaaagtcctctataaacagcttctaaaaactgtaacctaaaagtgtggtgtatgactctgattttgaatctatatacacataaatattatcataaaattattaataataatgtttaaaaaattagattgtactttaatatcattttaaactttgcattttaactgagcagtaattattgagtgcaaaaactacttaggaagtataatatcacctcatttcccttgtatgtgggaatctgataatttaacattgcctaatttcatatctctgcaatgttctgtattctaataaattaaaacaatttttgacataaattacccccttaaatagcagaaattaaagtttcttcacacttcttttacatcattcttggaattttcctgactactaaattgacataataagttatccaagaactttgctatttctctttattttaaacacatgcgcaaacctatcgatcaaactttatccacattacctacttacttatatgcatttcaacacctcaccattctgggagctcttgttcctaacattaaaagaaaaaaatctctccctccctgcaaacaaacaacaaatttttatgtaatttcccattaaactttcatggcaaacaaatttaataatttacgtttaaagagaaaaaatgaccatgcacaaagagactggaaaagaaacacttctacagctaggacaacaatgaccagatttgacaactgattactcccttctcaggctcttggccatgctccacagttatttttaaacactttagaacacctgggaaaattgtttctgtacagggtaattctcttgtacagggtaacatctccaagaggtgcagcaaaaaattaaaataccgtcagaaaaaaactgaacagaataatgaagggatcatgtcaatggaaggatatttaaagaatgtagacatatctagaaaacataagagaatagtaaaatagaaagcctctcctctccctcttcttcccttcctgcttctcttcttctctctctttattccttttctttctctcctcctctctctcactgtctctctctctctctctctctctgtctctccccatttgcctctgacacactctctctctctctttgtatttaagtttgaggatatcctagagcagaaccaaaacaaaaaagttgcaccaggggcatgttaataaccaaatgcaccatgtacaagattggttttatttatttatataaaccctgaggcactacattaaaattaatgggagaaaaattcaaggaaccggatttccgtataagaaaatttatttccggctgggctcggtggctcacgactgtaatcgcagcactttgggaggctgaggtgggtggatcaagaggtcaggagttcgagaccagcctggccaacatggtgaaacctcgtctctactaaaaatacaaaaattagccaggcgtggtggcaggcacctgtaatcccagctactagggaggctgaggcaaagaactgcttgaactcggtgggcggaggttgcagtgagctgagatcacgccactggactccagcctaggcgatagagcaagactctgtctcaaaaaaaaaaaaaaaagaagaaaatttatttgctgtcagagatgtacataaatcaattgcactgaatagtagtggttatggcaatattataaataaaattaaaaataatgattaatatttattgatccttgtcaaatatattacatgtattttcacatttaatccttagaataacggcatgaattagctacttttattatcgtcattttacagtaatttacattttacattaataactgaatacaccatatgatattaaagctttttaaatttcttacaggtgaaaaggttgaatgtaggaattcgactacagacagacactagttaagtattgtagggatatatagcatactagagactgagctcataagtactttgctacactgaatggttatgaatcatttatttctgaatttgccattgtatcatctagacaaatatttaataatctctctagcaaatgctaaaagccattgtgataatgaaaatgtagcaagattcaggcaactggtaaattgtagtagagttcattggtttcttgttttatgaccagtcaaatacaaatgtcacaatttctgggttgccaattttggaagccttcttcaaacgcctttataattattataattatacacttcccactggcccccccaccacccacatttattccaggcaatgtctgtttcccactcatggtacacaagcacagcttaaaaagcaatggactttggaaggctccatcagctttgcaggcccaaaatagtacatgaaacctttgcttgccctaaggattccctctttaaaagtctttcttcacatagtgacagtgaaagctccagctcatctttgatcttgctgtattctattaatttgaagtaaggaaagacaaagattcataaagtgcagcagctgtggtgacctgaatcactactttaaattcacttgaggactcaatgtatagaattctcaaaacagtttgtgatacggtttggctgcatctccacccaaatctcatcttgaattgtagctcccataatgcccgcgtgtcctcagagcaacctggtgggaggtaattgaatcttggggacaggttttttccatgccgttctactgatagtgaataagtctcataaggtctgagggctttataaaggacagttcctctgtacacactctcttgcctgctgcaatgtaagaagtgcctttgctcctccttcgccttcagccatgattgtgaggcctcctcagccatgtggaactgtgagtccattaaacccagttttctttataaattacccactcttgggtattttttttttttaagatggagtctcactctgtcacccaggctagagtgcagtggtgcaatctcggctcactgcaagctccgccttccgcctcccgggttcatgccattctcctgcctcagccgtccgagtagctgggactacaggcacccaccaccacacccggctaattttttgtatttttagtagagatggggtttcaccgtgttagccaggatggtctcgatctcctgacctcaggatccacctgcctcggcctcccaaagtcctggaattacaggcgtgagccaccgtgcccggtcactcttgggtatttcttcatagcagtatgaaagtggactaatacagtaaattggtaacagtagggtggggtgctgctgtaaagacacccaaaaatgtggaagcaactttggaactgagtaacaggtagagattggaacagtttggagggctcagaggaagataggaaaatgtgggaaagtttggaacttcttagaggcttgttgaatggctttgatcaaaatgctgatagtgatatggacaataaattccaggctgaggcggtctcagatggagatgaggagcttcttggggatggaagtaaaggtcgcttttgctgtgcaaagagactggtgaccttttgtcccaccctaaagatctgtggaactttgaacttgagagagatgatttagggtgtctattgaaagaaagttctaagcagcagtgttcaagaggaagcagcataaaagtttggaaaatttgcagcctgattatgcagtagaaaagaaaaaaaacatttttgaggagaaattcaaggcagcagcagaaacttgcataaaccaggatctaaaagctaatcactaagacaatgaggaaaatgtctccagggcatgtccagcagcccctcctatcacaggcccaaaggcgtaggaggcaaaaatggtttcctgggctgagtccagggccttgctgctttgtgcagtctcaggacttggtgccctgcatcccagcagctccagccatggctaaaaggggccaaggtacagcacaggccattggcttcaggaagggcaagccctaagccttgacagcttacatgtggcatggaacctacaggtgcacagaagtcaagaattgaggtttgggaacctccgcctagatttcagaggatgtatagaaatgcctggatgtccaggcagaggagtgctgcaggggcagagccctcatagagaatctcctgctagggtagtgcagaaggaaaatgtgtggtgggagcacacagagtccccactggagtactgcctagtggagctgtgggaagatggccaccatcctccagaaaccccagaatggtagatccactgagagcttgtactatgcacctggaaaagtggcagacactcaacatcagcctatgaaagcagccgggagggaggctgtacccgcaaagccacaggggcggagcttcccaaggctgtgggagcccacctctcgcatcggtgtgacctggatgtgagacatggagtcaaaggagatcatttctgatctttaagatttggctgcctgctggactttggacttgcatgaggcctgtagcccctttgttttggccaatttcttccatttggaatgggtgtatttatccaatgcctgtatccccattttatctaggaagtaactaacttgtttttgagtttacaggctcataggtggaagagacttgccttgtctcagatccgactttggacttggacttttgagttaaggcggaaatgagttaagactttgggggacggttgggaaggcatgattggttttgaaatgtgaagacatgagaattgagaggggccagaggttgaatgatatgttttggctgtgtcctcacccaaatctcaacttgacttttagcgcccataatccccacgtgtcatgggagggtcctggtgggaggtaattgaatcattgagaggtgggtttttcctgtgccatcctcatgacagtgaataagtctcacaagatctgatggtttaataaagcgcagttcccctgcacaggctctcttgcttgctgtcatataagacatgcctttactcctccttcaccctcagccatgattgtgaggactccccagccatgtggtactgtgagtccactaaacctctttttctttatgaagtacctgatcttgcatatttcgtcatagcggtatgaaaatggactaatatagtttgttatcaagatgaattaataaattataacattttataattaaaataagaaatgtaataagtgttacataatatcaaggtttccatgaatgtagtggcttctcagcatgtgaaatatatttatcttcagatatttatattgggatgctattgggaggatttattaaaatcaacaaattaaccaaaaatgatacttgagttcctcccatatgtaaatgacttatttattcattgttttaactctaacttaaactgaaatccagtttccggtttgtaattattttcttttgtctatgttctaaggtgtatatgaatgtgacactgtgtgtgtattaaatgatatattttctgtttcttttattggagcataagatttttaagggtgggactcagtgcttgtatgtatggttccttacagtggctggtaaagttttatctaaacaagctctctgatcttgaagaaatatgacaaaatatcaacagttaaaatttatcatcaaaatttgtttaaatttttaaacttctgaatctcatcactctaccaaaaatattgtgcatttgcatgtattttacaggataaacttgtatgtgttcattaattgaggactcgttttcaataccctggaggaacccattgcttaaaaggaacatggcaagaaacccctctgcattgtaacattgattgggtatttgattatttttatggctggtgcatttttatttcaataagatgatttgtgctaattcctgaaaatatttttgcaatgtgatttatgagagttaaagtcagctctgaatactggattttggataagctgacagcaatgcagtctgataacatgtgactacgcctattctgtagtagccccaggccattttccatgccattcaataaaaggagtttccattatgactaattttatgtgttctgaagatctttcattatatggcacagtgcgacatcatttaaaaatagaaatgcctataagacatttctttattttcttcctattgtgacacgttctttttttaagtgtgtgtacaccacccagacactcttcgctttattacctgattctttgtggtgtccgtaattccctagctctgtaaggtcagccttcaaagttcagatgagaaaagaaacaggcacatttgtgcatatttcagtctggctgaggggaaaaaaaatgagctttgagctggctacctcatactctttctcttagcatgccccacttttctactctgacgaagaaacacaaaatacaacattattcaaataactgtatagggaaaaaaatggctttctctgttccccagacttgcctgttgacataggaagacataaataaattcctaaattaattacggtaagtgattcacaatgtttcagtaaatatcttacctagatgaggttcaaattacttcagaggatttattaaaatcaacaaattaaccaaaaatgatagttgagttcctaacatatgtaaatgacttatttatttatttattgttttaactataacttatactgagatccagtttccggtttgtaagaaatagcaagataaggcctagtaagttagatcaaagaattcctttggctaaagttggatctaactttcatacttattattttactatatatgttcatgtataaaacccagaataatattatgtgtatgtataaaacctgagagacacataaaaacaattttgaaaagtcgattttgataaacacctattttctgaattatacagacttcagttttgctccaaaatgaaaggtgtgatagttaactcaaatttgtgattttgctttgaagccaatgcaattgccaaattgatgcctctgaaaccttcttcaccaaactttgttttaaactgaaaagacttctccattccttcagctcacagcactgacatggtctttggctttcagttattcttaaactagaatttcttcaggaaagctatttacatccaaaggtaaagaagctcatttgttagcaggtatctaagaaagaaagtgaaattttgtattgatgctctcccattcaaattcaaaaggggataaatttggtattgatgctctcccattcaagttcaagaagggataaaacaaatatctttatgaaaaggcctccgtgtttcatcagctaatacatgaaatttagatgagacacataaaagcagatcccttaaatcctagagattacaaaccatttgaaatgacaattgttctaaataaacatgtgattcacatggaaaatttttgtatttgctctatctattcaacttagttcacttttcagtaattggtagtgttcttctaatgtattaatccattgaataacatgtgttaggttactttctcagtatttttggacagtttgtccttacttcagaccagttcagtgttttgtttttttaaataaaatagcactcttgtatagcttcatgtaatattctattgccatcaatcacattataatgattacattaatatgatatatgaaaaagttgtttcccagtgccattcagatgcaagtaactccagtctactccaccaaacatatttttgtttgtaatatagctttttataaatggcttaaatatggagagctacttaactatattctttttatcccccaacccacctgtctcaaaatgcccccagtaaacagttttgctcatagaacttccttgctttctctcttttctttttttctttcttccttttctttctttcctttctttctctctttccctttttctttctctctctctccctctctcccttccttccttccctccttcattctctctctctccctctctcccttccttccttccctccttccttctttctctttctcttacttttttgatgaagagttgagtaaaagatcctttatgtgacaacaagtatccagactgaaaatttcactttaacttcctctttttgttatgttatcaagttgataccgttatacagtaaaaagaaaaagggtattattttcatccaactttgtctattttcagatggagttctttttatgaaagagtcaaaaatcatagtttattgagatattacttggtatcagggtgtggtatgagctaataaaatcatccaatggaattcttgctgggtttttaacagattaaagcttgcaaagaacttagcacagcatctagaattgggtatcgttaataataattaacattttactgaaaaatgtgttgctttctggacagttgttacccttatgggctatatagtttagatataatccattggaaaacatgtttattttctcaaaaaaatccctcaagtggccattgctgaggattatatacgcctcaggatactgttctaaaaagttcttgatccaatttatgagtgagatagtcaaggatcataaagtattcattcttatggttttacaggtttatatatcaggagtctggaaactaatttcttgtttttacaaataatattttattgaaacacagccatatgcatgtgtttacacggtatccacggctgttatcaagctacaatgctgtagttaagtagttgtggccagagaccacatgtagcccacaaaacctaaaacatttactgcctggtcctttaaagaaaaaagttgccaatatcttgtataaatggtcagcaactattaattcagctgaaagttaaatgatttattcaacaaagattagcaaatatttacaaagttttagaactaggaagcaggcaaatacttttcttatagagcttaaagttaatctagttgaaacagatgaaagcgtagaacaaagtaacctagactgtttatttttttgaaagtccttaaatatttcaatgcttctctttaataagacttacaagaaaaaaatttcccaatttattttacagatgggagtgcattttggcagagtcgctatcaaaactcggctgtcttttgggggcaaacagaggaatcaaaataaggatttatctccactttgacaaagggaagagaataagcccacttttgacaaatcaacatgtgcaaagtccacattttgaaccacgaggcaaaaattagtatgagatgttagtattatcttaattgcggaagagtcagatactcactcatagtacctctattattgagtctcagatttataagaggcagggtatgtgtggattgtgcttctatgaacaactaaattatctgtttaatccaatgcaagcaaaatgatgggaatttttccaatgctattattgattttcttcttcatgctacagtattaaggcttacgattctaaggtgctgcacaatggtggggcaaaacacaggttttataaaccctattagtgctgagcatactgtgcattgggaagacaatgaaaaacaaaaatggaggtcctgtgttttgaagatattaatggatgcacaggcaggttcatggctactcttttcatttgaaaactaaaaacccttctagggaagtgagttatccagttaaatctttccctgccagagcaaacataaagacaagatgtagtgctcagaggaaaaaccattaatcaccattgtcataacatgcccctcgattccattgcttcatttcagaaggtgacatcaagaataattatcatcagtcatgcagatttcaagactcttataggagaaattatgttaacatccaacctcaaatgtaaagagtactttaaaatgtttgtgtatcatgctcaaaatcagaaaaaaaaaaaaatctcccaaactccttaaggcattttcagccacataaactaaaataaattcagcaacagaaactagttctcatgagttctggcactaaatcagtgaagactatatcaacaaaaatatcactctctggttttcagagatgaggtgaaaaaaaattactggaaatatacaactttgcttgacttcctatcaatagttattcttaccgtcaatagacatgatgagttggagacacaggtctggaaaatattgtttcctcagtgcctagatacatcctgaaagaacagattggccttttcttgtattttatttgagagatatgaataagttttgagctttttctagtccctcaaagccttctgcttggtctagctgccctctgaatgcaccaacgatcaattatcttggatcaaagacaaatgcaaacaagaagaatgcagtttcctaacatctgtgggatacagggtgagaatatggaaggccatatactgtatatctaaatatttaaattataaaccaagtcaaaatgattagataaaatcttttccattcaactgtcttgacaaatatagcttatagcttattaacgatgtggataatcaagctcgaatttagaattctcagattctttgcagtttcccgtcagcacataggagtaaggaagtgacagtccctagggcctggctgtaggctcacctggtgtgtctcttacttctggttctgcggcaaccgtgagggtacttgcaggtgtgcctctacagctattcacctataaggtgcaagatccttttacactcctcaacgtctccacccttatacattatagctaccttggtctacctggacctagggttatggggtatatccatgggtgatggtcttggaggattaacctagaactaggctgtagctcttagggcaagaaattcactgattctagatgcctggaatatatagtctagaaaagaagcatagttcctaggagggcctgttcccttattctctctgcttcatgaggaagggtacatccagacaagggacagaattgggtcctctaaagtatgaccttggcacagagactaattagtatttctcaaacctaagggtagtaccactgatgtgtttctacgtcagaaatgcatacttctaccatcttccatcatacatgttattcttgcctataaagtataatctagaaaatatttaactctcaattggagggggaaatatcattcttccattaggttattgcacagcattttgtaataacttaggtcaacgttctaaattgataagatcaaatcaaatggcccatgccttttgcaattgttttctgaatgattttttaaaattgaatttagcatgggttattacatataagccatagtcaaacctgcatggactatatcttcatccccaatgagtccctttcattatattttaggaaatactctgtacgtggtataccatgcctttatgtgagtttggtctagtttagactctttccgttcatactaatgtcttatatgtcagactgttcactgcaaaatgaacctctcttatacatgtgctttttcagggagtagccctctggagtttattcactttcttcactttctatgatcctcttgacatttttgaaccatcttctccatctattctttactctacaagtcattctgattatacagaaatgctttgtgcctagacacaaatgtcaattcacagacaattcttcaatttcccagaaaattgacctcacagatcttaaaggcattggctgaggcagactgtttccttctgaaccggaatctcaatggggtccatcatttgtatacgcatgcttcattttacaatgttgccaaacaaggttgattgaggggtaaggggataagcaattactttagcatctgacttctacagttaacattacaatgaaatataaaacttggggcttgttatggaaacactttgagtcagccccttaccttgaatgacccttctattccatcagatacctaactcaacactcactttggaaagaatctaatgatatatccattctcataaatccatagacttaatctgtgttgtattcatttacatttttaaccaagcaaagctacaaagtaaataaatatataaaggatggatgataaaaccaagtaactttaagataagcaagttagacttttcctgggttcacgtgtaaactatggcagtgataattcgtaacgcatcctatgaatgtcattgcaaatgataaggataatgcccaaacatcaaacacttttattttgggttatatacatatttttatagctggtatttaactagtaagactgactattaagtagaatgcttactcagacttatcttaaatagagttaagactcttaccagaggaaacagtccttccttttgcaccagcttagaccagccgcaatttgttgagttgagaggactggcacagctctcattttcaacatacccacataaattgtaaacgattccctggaggtcaataagtcacaatgaactaaaatctccatttttccctttctgcaggaatacagtgttcttcattttttttttaaagccacattctattccaggaatcttgggaataagaaatcataatagctataatttattgagtgcaccttattgtgtgctaagtcctttacacatctaattcaatgctcacaataacaatgtaaaccagtactgtgaacaccttcatataacagatacagaaacagaagatcagaaaattttggtgatttgaccaaaatcacgctacttaaaacatgtagaactgagatttgaacctaaacctggatgactctaataattcatgttttaactactacatgaggtttcttgatttttgttttttttcccagtagaccaaaatctttggcctcagaatatagttatgtttctctcttctaggatgtagcagtattcttattgtgttcttgagtgccaatcatggagttattcaataagaccaaaaatctgaggtcctttctaagaattgtcttgatggcttgttgaagccactgtgtattacataacacaatgacttattctcttctgtggttcaccaaagggcggcacaaatctatgaacactcttataaaacaacattggttatgacagccctctgggtatagtcttcagaatatggttccaaaacgttaatctcccccttctagcagtttccaaaatctggtacctaataagcaacttagcaacgattcaaatatttaatataacttgtaaaaccatgtctggctgggtatatttgcacataaaatccgcaatatcacctgctaattagatcttatttaattgaccgtagaagagtctaatggaatgaattagtggtgtttgaatttctgttggcgctgatgataatgacaatacaatcttatctaatttaagctcagctttgggaaaactgttatggctcctaaattactaaaaccactggtttcctgctttttcctaaatctaaattagagtacatgggatgctcttttgaaatgagtcagtggttttgagagctggcctttataaacccagaggaagccaatgataactaactcaagggcaattgtcctgtatgagtacatatacctgcctcaaactgagtttgacatatgtctaatttattagaatcactaagaataatggcacataacttttcagaaacaaaggagagcaatctgttcttttgactgtctgatgaagcaactataattgtttaatatgatcactataatgaatgagttttatgtatactttttaagctggggaatatatatataattatattattataatatatatgatataattatattattataatatatatgatattatattattataatatatatgatataattatattattataatatatatgatataattatattattataatatatatgatataattatattattataatatatatgatataattatattattccctctcatacaaaacattgtcactaaagaggcttatagatattgctttgttttttttcaaatgtgaagaaaatttattttaagtcattagtatgcttttacttggtccctgtttattttcttataaaattccaaactctataaagtttaatcaatcattctctgctggactcaaaaagttggccactgggtaaagttaagcccaggctggagggtaaaaatttgcctcctaggccaggcacagtggcttaagcctgtaatcctaccgctttgggaggctgaggctggtggatcgtgaggtcaggagatcgagaccatcctgaccaacaccgtgaaaccccgtctttactaaaaatacaaaaattaactgggtgtggtggcgcacgcctgtaatcccagctactcggtaggctgaggcaggagaatcgcttgaaccagggagtcagacgttgcagtgagctgagatctcaccactgcagtccagcctggccacagagtgagactccgtctcaaaaaaaaaaaaaaaaaattgcctcctcaagttaatcaaaagttagtcctctgtgtggtcattccacttttgaggttggtgacaccatatttatcttcaagaattaccccttgattatgacactactttaggagttcagatgtataatgaccagtgcatggatcagtgtggaaacatataataatttatcttgagtggtgtttgtagttcatctttgcactgttgtatacattgtatacactacacatggattgtgatccttcctctctctgaatttttagaggctgaccattagcagcaagatgcagagctttccattgtcctaatccaaaagaaatttccaaaatgcacacaatttattagtattattaagaatgtggcaaacataataacagaaatcatctatcatttagttatcaaaataagactgtaggcaattctgtttggttacactttggagaattcttgatctcattttaattcaagtatacaaattaaatacagctccttcttttacacaatgccagcacaggcaatgctcaaccacacttccagattcttaaccgtttattttaagctgttgaatagtgatgacacaatatcagtccccttaaatcagtattttttcaaaaggaaccaagaaggcatttagcctcagactcaaaaatgatccaacccacatcaaggctagcagttcttggttaaaatggaactgactctgagagtcttccagcaacctctctcttcagcaacaagttatttaccaaaaaccaatggagctgaaatgatatgacattgaatttttaagacaacaatttctcatttccttgccagaattggaaagagataaagtaaaataaacagcattaaaataaaacaagtctcactcctggtaacctctaatattaacatcattttcttttcagcaaaatcttcaccctacttatcaaagaacatgaaaatctcaattgatgggacaaacaggaaattattattcttattatatacttcttttacaatgataattatggcatggagacatcttttacatagtaaaatgaacatcttaatcttttgcaaatagcgtggttatttccttcctgggagtggaagttctgagagagcgaagagagaaaggaatactgatatttctgagagtctgccaggagaaagcctgcctggccagtttagtggcggagctgagtctgaataaggtattttgctgccgaaaagaatgccagcttctgtcttgataacttcccatttggcaagtacaaagtgtgttgatttttacagttgatattacagaagtgtatgcaggaaaacaaaacaaaacaaaaaaacaaaaaacacaggctgctgagctcaatatcctattgcaatcacaatatcaatgtatgttttctaagaatgttaccattcatgttctagaatcatatgactagaaagtgcaggctctcatatggtttggtcgcccagctcagggctgaatgatgtcttgaaagaggtatcaaagaattgaaagaaacacaaaaccaaggtgggaccactctaggcacgtgcctttatcccttaatcaaatgttcagtgcacttcttttgattaattagattcccaatgatgcaactgcattgaaataaatgtattacatttagtatcagtctaggttcttcaatttctcactttagatacatttttggacgtgttcaaagaaagtttcacacagtcccaattcatcaccttcccctcttctgttaacagaaggaaacttagtaggttgcctgactttgcctaatttccatatcccaaacagcaagaacaagttcaactgcctaaaaatttcatctcatagatgaaatttccttgggatattagctttcataattaaaaaactcacaggtaggcatattctagagcatggtaaaaaccaacatgatctctcatcagctgctacagaatatattcaaccattcatgtggacaattattgattcatctgatcatgtttttgacaatatctctgggacatctttttgggtagaacggttgggaaaagagagtaacctccgttggaagatatgttttcacatctagttttactaaataggtttaaatgtttactctagtattaaatgttactttcccagtacagccgtcttaaacaatgcaatttgtcttcatgcacacacatgtgtatgcacacacttatccacatcaaccattatttacctgtataagtagagaggaacgttgatggagaaaatttcaaacagaagaaaattcaaaagttgttcatgcttataaagtacatatgctttggtgctgggtttgccttccaaattatgttaatattgaagtgaatttgcgttctccaggcatgtaccagctatagagtgagacaggagaggcttggtgagggacagagaggaggaaaaagtggtgttcaaaaaccagaggagtgggcagaaggcaagcagcatttattttttctgaggcagagactcactctgtcacccaggctggagtgcagtggtgtgttctcggcttactacaacccccacctccagggttcaagtgatcctcccacctcagcctcccaagtagctgggactagaggctcgcgccaccatgcccagctaatttttgtatttttagtagagatggggtttcaccacattggccaggctggtctcaaacttctggcatcaagtgatctgcccacctcagcctcccaaagtgctgggattacaggcctgagccaccgtgcctagccagcaagcagcatttgaaagtgttctctggactatctacagaataaataatacatgtgctgaaccaagtattcattgtcatctttattttatatatatataattaaatattaaataatattaaatattaatattaaatatatataatgtttccattcaaatgtttttttcagaataatttttcaaatatgtgctccgcacttacataagcacatggaaaataatcttctgactgaggtttgtccactgcgtgaacgacatcttcacatataaacagtcatggttatttaggcaccaaatcacttccatctcattcaccagtgtgactcaggagtgaaccagggaataaaataaatgatgttggcattttctccttatgaccaggcacttgaccctgggaaagggagatgcggttgttaaaacaacagactataaactgctgtagtggtctaggaaatatcatttaagaaactctttggacaggggaatcggagtgaatttgcagcatcgcttgagctcagaactcagcaaggagaatgagaaggggcactgcatgtgtcccagcctccccgctggccgctgcagaattctctctggagcaaagtagttccatttgatggtcaaaaggccaggccagaaaaaacctgctgtaactgggtttggacagtgcagataatttcctggggaaaacaccactgtatttctgctttccctgaatctgttaaaaacatgtttgttttggcatttttcagctcttgtgtgattttcagtattccacagtttgggaggattagattacaccttgtgaccaaaatgagggctaggagtaagttaactccgcagccttacaatcctataattttgggttcaaatagaaggagtaaggtgagtctggataaactttgttttaaggatttaacacaatatactgagcagggcttaagacatcatatttctacattatatactaaaggatagcacatgatatctgtgccttaaacatatcatgtgccaacacttgtcaaaccatggaagagttgtgtataaaagagcttgggaatgaaagaaaagcaagagttccaccccctcacttcagagaggagacaccgcatcacatgaaatttaagggattttttttttcagaaacacacataaaaaagtagagctcccagtagaactcagatctcctgacttttggcccaatgagcatatatgtgcatgaagacacatctgctcttcagatcaaaagcttctgtttgaggcgcgcacacacgcgcgcgcacacacacacacacacacacacaaaattatttaaaatataacattttatagttttgttttttgagatagggtcttactctttcacccaggttggagtgcagtggtgcgatctctgctcactgcagcctccacctcccagtctcatgccttcctcccacctcagcctcctgagtagctgggaccacaggtgtgcaccactatgcccagctaaatttttgtatttttggtgtagatggggtttttccatgtttcccaggctggtctgggtttgtttggttttagaatactgactgaagtagctctgaattgctcacagaagctctgaaaataaaatagaaatgaactggaaaaaggatactagataaatgtcaattcttcctctttggagcagatgagagagaatcctgagcattttctaaaacatgaatgccttttctaccactactggggaaagctctattagcaaataaagagtagaaatcctttgatttaacaactgcctcttcattaaagctagtaagtatattccctcagataatcattacactaaaaatatcagagaagacataaccaccctaagaaataaccatttgtccagtgtcagaaagaagaagtaaaagcatatttttacacacttgtatttatttgtcaggttctttataaatttataagaaggcaaaaaaaatcactctaaaagcagagataaggtctgtaaaattaataaaagctatgtttatgtaaccacaacatagatggatagtaacatgtcacacattgtttcactttttttggattagattaatgatgattaaagtttcataactgtaatcatttcacaatcattagcaagcttagaaaaggaggaaaaggtaaaggagtacagcacattgccaaatggcagatctaacatgaaaccttgtgttttgtggaaagaacaagaaggagacaatgatgagtgtgtgtctgtgtgtgtgagcgcgtgtgtgtgtacgcatgagaaagagacagagacatagatgagaaagaaaaagagagaaagagagacagacacaaatacacatacacagagacagagaaagagaaacagagagggagagagacagaagcagacagacagagccatagagacagagagagactatcatatatcaagaagattggatccaagtgtgagtaaagatatggctacatgatgtagcgcatttcactggacttttactagcaggtgtggaattgagactgatgccatataggatgctgagtgaatttacagccatttggcttggtttgctgctggcccaaccttctttttcaaaattatctatatgaagcctctcctgtggctactgactgattgtgtattttactatgtccacaaaggatgggaaagagcaaaagccaatgtgttgaatccagccatggacaggatgttagcaaagaaccctttgtggcttgttattggagacagaggggaaatcatcaagattttagggggaaatcagctctgtaaataaattacattgaactatagggattggcaaacaaaatccatttatctgccccattaagctggtgtcatacccaataaaatcacaaggttaataacaaattattataaatggtaggaaattgttggtaatagatacattttaaaaaagaggatttatcagggcaatttctagcagagatagttattctcccatttttttaaggaagtatactttaaaagaagtatgtgaaagaaatgtaggtatgtaagaaaggtaagcagaagcaacatcttttggttacctgttagctgaatttcccttgcaggaacatgatgcctcatagaatttatagtcttgaatcttatcttgcctgctagggagaaaataaaataagattcacaaaacatttaagtttactaattctttagctagatcggtttctgaacttttctgcatacctggatacgaacagagaagaggggatgctgcactccaggggttaagtgatggggtgataggaaagagtgtaggtaaggtgtcaaaagggaaagatttgtgagactagtctaccctgcttcatgttttatctaaggatttttagaccatgacttaggattgtgcacccagggtttttttttttttttttttttttttttagactgatgaagatagataatgcacttttttttttttttttttttgacagggtttcactcttattgcccaggctggagtccaatggtgcgatcttggctcactgcaacctctgcctcctggcttcaagtgattctcatgcctcagcctcccgagcagctgggattacaggcatgcaccaccacacccagctaattttgaatttttagtagagacggggtttcacatgttggtcaggctggtgtcgaactcctgaccttaggtgatcctcccacctctgcttcccaaagtgctgggattacaggtttgagccactgtgcccggcctgataacgcacatgttaatagaagaactttagtggctgcttcccaaacttcactctaaaagataaatcaacttgtgacctctgcctttcaaatcacctctgccacctccttttcctccatttttaaagagtattctctactagaaaacctaactgttactcttaagtattctatcattacagatgcttttctgagaaaaactaatgatgtaataccattcaactacagggagcatcaagacactggcatttggaaatctagaagcaattcaactgaagatgactcatcttttcattaaaaggaagatccattcactgtttctagcgcttcacttagtggcaacattaagtctttagagaagtttgagttaggatgagtgcagctggttatatgcattgttttattaattcagttattcattcactttaatggcaagttacaatggcacttaatgtttcaacaactctgctagatttgggaataaaacacaagggtaaaagacccatccctggtctttgacagtgtaaggtatggcagattatttaaataatatgataaatagtaaagtatcagtaaacctttagggttagggaagatgaaatgtgagctcaaaacccatacacggctaaaggagaagatgtgaggaaatacttcctctaaatatccaaactgtggttttgtcatgaaaggagattagagtgaagaaaaatggacagtaagggaagatattcttgttcctggataagtagagtacataaaggatttagtggttatattttaccttcaaaatgagaatatagtgaaatattataattggagaagaatgatcatactcatgcttcagaaaagtcagcgtgaagaatgaatagaatgaaggcaaacacacacacacacacacacacacacacacacacgcaaaacaacaaaaacaatttaagaagcagtatatcctagcagttaagatcaaagactggggaaaagactgcctatcctggctgttctaaataatagctgtgcaatccttgcagaagttctctctgtgtcctggttctttttttctgtaataataatggtactaatgctgtaaaattttataagaattagaagagtgaatacatgcgaaattgcttagaacagtgcctggaacttagagaatgttctatgagagtaaacttgtagaacaacgcggtgacgcatgggataaattaggcggatccaggttgatagtgcagtgaggatagagagcgggaagtgattttgagaaatattaaataagtagaatctataggagttggtaactgtattaatttgttctcatgctgctaatgaagacatacctgacactaggtaatttataaaggaaagaggtttaattgacttacagttccacatggctggagaggtctcacaatcatggtggtaggcaagagaaagcttgtgcaggggaacgcccctttataaaaccatcagatcttgtgagatttattccgtatcacgagaacagcatgggaaatacccaccccaatgattcaattacctcccaccaggtccctcccatgacacgtgggaattgtgggagctacaattcaagatgagatttgggtggggacacagccaaaccatatcagtaacttattagatgtaagaacttagaaacagaaggcttgaataaaccccaggtttttccttttgtgtctgatggatggtgtgtctctcttcactgcaataaaaatacaggaagaaagcccatctaaggaaagagatgatgaattcagttttggatgcagacttggagatgtcttaggatttctaaataataaggtccaatgggagattgattatcatgaattataggcaagagaagcttgccagaagatatagatttaaggggcccttagaatattaacgaaaattgaggccatgggagcagatgagatcattccagagagtgaatcaaatgaggagaaggccaaaaataggccaaaaataatccactgcagaacatttaagatgagagtagaattataaaactaacaatagaaaccgagaatgaaaacagagagattccagcttctggtcatgatggagtaactgcactgcattcaatctccccttgtaaacaaccataaaaccagaccaaaatctgtacaattgttacagatgttataggtaatctgattgttatagatgctggattatagaaattatagacgctagatcatgtaaagccgttctgtgaaccctgagagaagggaaatgatgaccaccagggtggccccagctttctgcctgaaggcattttctgcagtgcagtgcaagaaggagaagcccgattagagaacaaagggcttgcttaaagagggatggagttcagggctagggatgcagctggaattcgtggggcacagctgtagaaagaaagaactgtgtagtgaaggagctcctaaaatattcacaggcatcctgtcgagtatttggctgaatagtaagttcacacatgtaggaagatactccaaaagtctaggcgaaaaataacttactgagtaaagaaaagatcctggggagctgtaagctgtaatggccaaatcttggacaaggctatgagatctttaattttctactagctagagtgaaaaatcttgttgaagagcataaacattcagtagatgtaccagcaagttcactcattaggaaaagggcacctctagatgaaccctaacaaagcttaaaagcaaatctttaaataatcacactgatgggcacgtaaactaactcctcctctggaacaaaattcaagaaggagtgaacaaaatccaaacactcaataacttgacatccatatgtctatcatatattaatggtaaatttttttttaaaatataaactaacaggtcccagaagctcaatacgacccaggcaggataaacaaaaagaaaaccacagcaagaaacatcataaccaaaataattaaatctacaataaagcaagtaaatgtgatgctaacaaagaaaaagaagtcagtaaatataaacagattcagaaattagacaataaaactaaaaatcaaatgctttaaaagtacaattatagatatgctaaataattttaaagtaaatataacaacaatgcaggaaaaatgagacaatcgataaaatggaaattataaaaaaagaaacatgaaacctttagaacttcaaaatatggtattggagtgaaaaattcactatattgcacagttgtttagaaactgcagaaaaaaagataagtaagcttgatttctcaaaaatttaaacgtagaattaaatcacattagccagtaatttctgagtatatactaaaaagaaacaagagcatggacttgaacagatatttgcacacgtgtttattatgacattattcataatagccaaaaggtggaagcaaccaaagagttcatcagtggatgaatggataaacaaaatgtggtatatacatataatggaatattagccttaaaaaggaatgaaattctaacatatttacagcatggataaactttgaagacattatgctaagtgaaataaatcagtcacaaaagtacaaatattgcataattccacctaaatgagctatagagacttgtcaagttcatggagacagaaagtgaaatggtggtgtccagggaccgggcagagggggcaacaggaagttagtgtttaatgacattggagtttcaactgtaaatgatgaaaaagttttgaaggtggatagtgataatatttgtacaacattatgaatatacttaatgacatagagctttacacttaaaaatgattaaaatgataaattttatattatttatatttaaataaaatattctaagtggatagtttctttgtaattagattgcaatttatttgcccttctctatcttctaaatttttataatgaacatattgagaaaaaagtaaacaaacaaactgaaaaactaaagtactatgatatttatcccgctccccaatttgtaaagtaacatttaaaccaaatatatatgggtttacatttcagggaaagattttttctaagggataatacatatggttggaataaaatgtgaaagaattagttgaattagtgactgaattttatgattccagaagtacatcagagttttgctttgcttttgctttccttggtttagcttttacataataaaaatcaccctattgaaaaaaatcagtaaactttagaaaaataaaaactatccaggcgaaagtacaaagagaaatatctatatttatatctatatctatacctggcaaaaacactgaaccgtggctcagtggcccatatgacaatatcaaaataatcaatatcaaataacccaatgcacatataatcagagtaccagaaagagatatttagggctgaaaaggtacttgatgaaatagcaatgaaaatatttccaaatctgctaaaaatatataaactagcagattcaggaaagcaacagctttccccacatggaataaatggaaggaaaaccacagcaatgcccatcataaacaaatttgtaaaaaaaaaaaaaaaaaaaagaaggtactatggcagacaaatcttaaaggcattcagtaaggggaagaagacacattatatacaggacaacaatggtaggaaagactgctgatttctcaacagaaacaatgatagccaggagacaaagacctgtcatctttcaggtgttggaagagcaacaaaaagcaaagatagctatcaacatagaatcctatatctagtaaaatgaattcttcaaaaatgaagacaaatataaagattttctaggcatgaaaagctggtagaattcattgccagcagaactgatttataagaaaagcgaagttcatcagcctaaaggaaaatgttaaactatgaaactgtgaaaggaagcctcaagtgctcctgcacagtttccagattctcttcccattcttggtgaccatgatgttccagaggagagaggtttcatcaacattgttctctgagtgaggataccctcttccctgcaaataatttttatctggttaactctttctcatcctgtattcaattcaataataacttgtgatactcaatactgaatgtcaacttgattgttgaaggatacaaagaattgatcctgggtgtttctgtgagggtgttgccaaaagagattaacatttgagtcagtgggttggaaaaggtagacccataacatttgagtcagtgggctgggaaagtcgaacccaccattaacctgggtgggcacaatctaatcagctgtcagcacaactaaaatataagcaggcagaaaaatgtgaaaagagagactagcctagcttcccagtaggggaatccagcatctttctcccatgctggattcttcctgcccttgaacatcagactccaagttcatgtatatatatatgtcccattagttctgtccctctagagaaccctaactaatacatgacttaatctggaattcttcccttacactccagactatgtttagttattctgctgcaagttttcatagcaccctatattttactctcttcttacttatctcagtttttaattatacagttttgcaaagatattattttagataattgtgtctccctccactgggaaatttgctccatgaaagcagagacttaccttttaagaacgttgttgtatctccgagggttaagattgttaatgtttaaaaaaatgtttgttgaatgaaagttgaatgttgttaattaagaagaatagtattggagtttaaagaatcagagttaataagactatttcaagtgaagcatcacaagatgctgcgatgaaggtaagtgttttgaagaagggaggaacttagaatattaaaaagtcagtggactttgagactacagttgagtcacctatatgactatctaagttccacgagatcataaagtttcaagggatggaaaagcaagagcataaactaacgtattaatatggaacgacacagtcaaacatattttttcaagatgtttttggctgcagtttggagaagtctgtaaagtagaaacagaggaagtagggagatcagaaagagtggcctcttgcagaaaccagaaagatagtggtcaatggctacagtgatgaccatggagatggtcaaaagcactcagagtcagtggaacattttgtagttggagccaacaatatttgccattagacatgagatataggataaagagaggagtcaagaatgagtccatgatatttagatgaaagcaaagggagacttgtcattaactgaagtaggaaagattttgaatacaagatcagaagtttctagacattctttttttaaaattttactttaagttctaggatacatgtgcagaatgtgcaggtttgttacataggtatacctgtgccatggtggtttgctgcatctatcaacccatcatctagattttaagccctgtatgcattaaatatttgtcctaatgctctcgctcccattgcccccaccccccaacaggccccggggtgtgttgttcccctcccgctgtgtccatgtgttttcactgttcaactcccacttatgagtgagaattccagtgtttggtttcctgttcctgtgttagtttgctgaggatgatggcttccagcttcatccatgtccctgcaaaagacatgatctcattctcttttatgactgcatagtattccatggtgtatatggaccatatttctgtatccagtctatcattgatgggcatttgtgttggtttcatgtcattgctattgtcaatattgctgcaataaacgtatgtgtgcttgtgtctttctagcggagtgatttatattactttgggtatatacccagtaatgggattgctgggtcagatggtatttctggttctagatccctgaggaatcgccacactgtcttccacaatggttgaactaatttaattcccacctacagtgtaaaagcgttcctatttctccacagcctcgccagcatctattgtttcctgacgttttaatgattgccattctgactggcgtgagatggtatctcttcgtggttttgatttgtgtgtctctaatgaccagtgatgatgtgctttttttcatatgcttgttggctgcataaatgtcttcttttgagtagtgtctgttcatatccttcacccactttttgatgtttttttttcttgtaaatttgtttaagttccttgtagattctggatattagacctttgtcagatggatagattgcaaaatttttctcccattctgtaggttgcctgttcactctgatgctagtttcttttgctgtggagaagctctttagtttaattagattctacttgtccattttggcttttgttgcaattgcttttggtgtttccatcatcaagtctttgcccatgcctatgtcctgaatggtattgcttaggttttcttctagggtttttatggttttggattttacatttaagtcttgagcaattctagacatttttaatttgagactcccattatgcgtctaggtgaagacttcagataggtagctggaagtatgagttgagatgtctatggggaagtcttggctggggtatacatttatgcgtcatcagcatttctaagtgagtgagtgtagacagaaaagaagtccaaagtctgatcccctgagcttgcctatatttacaggttgggaagatgaggaggaataagcaaacaccactggaaaatcccagaaagataaaactatgtgaatataatgtcctggaaatccaggggaaagaagtgatcaactgtatcaaataaaataattggccacagcatatagtacagaagtcatggatgacaatgataagagcagtttgggtggaacggcaaaaacaaaaccctgattggagtggtttttttaaaaatgggaagcaaagaagctgaggctgaaaggagaatagacgacactttggtgctgatcttcaatcctggtgtaaacatgatagcatcattagcctgaggaggtttccattcctttacttacagtgacggattctcaaactgaaagtaaggatttagccttgaggggtcttccaaagcaaaccctgaataaaaagctctttctgtttaatctcaaggattgcctggttcttttcactttaatgtactaaaggtgtcacaaaccagataagaaaagaagttgctgacagtgttatcgatctgaaacttctgttttaaatatcagaatatgaaagtaaaataaaatcatctcctacttaatagctaaaatagttgtataaacaacaccttatttttttatccagtcacaaccattactggcagaatcatatttgtattatgttaagtctgaaatattcagcccaatatattgatttatgaagagaccattttacattttactttaacaggcattgtgcactcatgtggttgggacgcgacttagaatattcactgcttttagagtttgagtaataagctttatttacctatagtttggtatccacccaccttagaatgaagcagccgtgtaatcctccttagttgctaaactttgaatcttgggagtattacaaatggagattgattgcaagagttcatgggaatctcagacaccctggctggggtgaagagagggcaacattcatctgaggaatgtatttcacattcagtaatatttgaccccagatgaaataaaatgtggcttcacctccagtgtaaatattggtcagttcctatcccattaagtgttcctgctactttccctaaagacaaagattctggcctatcaatcataataatactcccattagctcttgagcaacatgtttgaataggaaactctctctctctctcccttttgtctgttgatgatttagagacagtaagatctccaggcttatcttgaaaatatttacccagcttctttcagtgatcatttcagagcttggtcataaaagcatacgtttctctaaagcaaagggtgataaaggaggaggtacacacagaacctttgccagtctaacattttggtggaaggtgacagagaagataaagagaccaatgttgaaaaacatgttttaagttatctgcttcatgaagtgaaacaaaaatagaggtataaaatctccatctggtttcattttatcttctcctattaagtacagacctatctatatcttgggcttttttgttttttttttcttccttttgctttgttttattcccctatgtttctaacttgtttctaaccctttgagaaccaagcttgaaattatgagttaaaaaataatacataaaatataaaaatattaatgttctattttagtttagtctctcttagcagtggactaaacaagagaaactaaacaagagaaaagtgacaagttgtggttgatataagtgattttaaaggacagttacaagaattatactagtgggaggtacatattgatcctactaaaaatatttcctatgttaatgactgcatagttgtccataagaaatgatatttcctattagtttattatttttcagtattttatagaaaggctggtctttacatgagaaaatcaatgattcttactagcattatgtattgagacttattctgttctagacacgatgtgtaaagatttacatgtgttatctcatgtgattatgagaccaaaaatctattttgcctgtactatttttaaataggagacattgagctcagagaatacaacacattttctagaaggcttgtgagttcagaatggcagttatttcacttgctgtctgtgtgtctcacaggtcaccctgaaagcactgactcagtttagcatgccgaagtgtccccactggatggggacagggagaattctctgagctaaggaaccatgttcttaggatggatgcagatttataactttgaagtggaatgctcaccatgacaaagacatgttattttaacctcttgtattcatcttgttatataaaattatgctcttgtgtaaaaggatatgaatttgagatacttcagcctagtattatagcctaataaatatccaccatgagaacatgaaggttaatctacctgaacatgtgtgttaatctttattttctcctaatattctaatctcaactatctctattgtaatgtaagtgacctttgtatataactggattttatttcaacatcattgacttattttagactattagaaaactgtcattatatttaaagtatatttatatatgttataaatgtactttatagtatactgtatttatattttttaaagaatatttatgtgtagataagatgtcttacattttcccgacagtatttccttgagaaaggaagagtgggtacattttcattttagttatgaacacgttgaagagaacagaaggcaaatgacatgccccagggtagagatttcattggtgagaatgaagatatgggagtggttgtgtggtcacgtctcggaaaccggtaggacttgcagcatagcagaccaaactgactgaagagcagattccagaattcatagaagctttttccctatttgacagagacaatgatggaactataacaacaaaggaagtggaaacgataatgaggtctcttgggtagaatcccatgaaagcagggttaccagacatgattaatgaagtagatgctgatggtaatagaacggactctcctgaatttctgacaatgatggcaagaaaaatgaaagacacacaaagtgaagaagaaattagagaagcattccttgtgtttgataaggatggcaatggctatatcagtgcagcagaactttgccatgtgatgacaaaccctggagagaagctaacagatgacaaggttgatgaaatgatcagggaagcaggtattgatggtgatggtcaggtaaactaggaagagtttgtacaaacgatgacagcgaagtgaagaccttatacagaatatgttacatttcttgtacaaaattgtttattttcctttttctttgtttataatttatctctaaaaggtttcttcctactgtcaaaaaaatgcatgcatagtaactaggactccgttcctccatgttttcttctcttatcttacttgtcattgttgtcattgttctgaaaacttattttagaaaattgatcaagtaacatgttacatgtggcttactctagatatatctaagcccttctgcacagctaaacttagatggagttggtcaaaggggaaacatctgggttgtgccttttttttttagttttctttagaaactgcagcatgttgttgttgaagtgtggagttgtaactctgtacacaattgacagtcaacaatatgtacctaaaacttgcactattgcaaaaggggtgtattatccaggtactcatacactttttttatatatattactggtcctataccagaaacattttgctttattgttacttgctttttaaactttgtttaggcacttaaagaaaatctgcttatggcagaatttgcctcaaatccattccaagttgtatatttgttttccagtataaaataacaatttacctccaaaacccccaaaagacaaaacaaaaacagaatgaagatatgaaagctcagggctcctgaattccaaatcactttgctatgaagccatactatttcgaataaaacaaaatgatgtaaattgcctgaacaaaatatgtgtttgtggagcaatgcaaaggtaatatatactggtaagccacgtgcttagaatctttgacaaaaatactagaagaaatttttttttgtggaaaatagctttgaagtaaatgtttggaggaaatcttccatagaacagataccataaaattaaaacttgtagtcatagggaactgattatttttgtttaccttttacttttgatttttcactggcacataaacagcaattttcagttctaggtgggagctacctttcaataactcgaacatttggtagcccaatcatgttttactgaagcacattttcacaagaagtaatacgtttttaaaaaaaatacaaatatttcttattcttaggagttgctttgccttgcaaaataagtgaaagctattacaaatgagtattcagtgcattgctgagataaagttgtggtcaaactacatttctcagtagggaactccttttctcctgatagagttggaatgagttcaaagaactggaataaccaggaaagaagatgaaccaactgatttataaatgaagattaaaggataaattatagaggccaaataaataggctttgtctaagctgtgtgtaagagcacgacaggattagaagcacacgtcactgaaagtttaaacattaatgaaaattattacatagtacaataaaataaatgtagtactgaaacagtagagaatatgaggaaatgtaaaacaatactaaactcatcatgtagctttgctgtggccaagaattactactttacaaaaggggatctccggggtaatagtggaagctgttttatgactacaggcagactcaataaactcggaccgagatgaagtattttattactcaagagtgagaaagaaaaaccatgcttattttcctcattaggataatagatcattgtggcttaattcccatatgattcaggaatttaaaattaactattatcaaagttcgtggctttgccttttaaaatcacagattcctgagtattcaacagatacattcaaatacagaggacataattatttattgttgtataataaattaataaacacatagtggcttaaggtatcaatacatatttattatctcacatggtctggcagatcaggaattgactgatttggatggatgattctggtttagggtctctcatgatggcgcagtcgagatgtcgcagcatctgcagtcatctgaaggcttggctggggccgaagcctgggatagctcactcacatgctgggaggctggtactggctattggcaagaggacttatttccttgccacttggacttcttcataaggctgcttgtgtgttctcatgacatggcacctgacatccctctgaaagggtgatccaaagaaaagcaagcatagaagccaccatgtcttttatgaccagacttcaaattcacaaatcatctgtaatatcctaccgatttcacagacaaaccctattcaacatgggagggaactgcaggaaggcatgaagactaggggatgagaatctctggaggtcactttggaggctggctaccaaaaatgtttgtgtcaattttaatttattttaaaatcggatattattttcttttgcaaaataattctttcccaattcccccataatagcaagtggggcaccaatctaggtttaaataaaattgttgtcattagctaatcttccaggtgcagagtagttgagatctgtcaaaatggttcacacctctcaataattatcatgtacaaaattcttattatgctccatataatcctcacaatgatccttagctcaaaacaatagatagggaattgaggcaagaaaggttaattaatttgccaaagttcacatggctagtaagagagggaagcaaatataaatcccgactgaactggcagagccatatggtgaggtcaagaagatggcaagaaacaagaggcaaacataaatgagggaatttggagtgcattcacaaagggactattacaaagatgtatatagggtcagaatctatggcaaaagatacttcagtacctggagctagggagagaggtaaaacataactaccttagggatgcaggaatgaaacgattgtacgaattttgagagagctacactgagaggacctttgataggaactatgaactttattaaaaagacatagtccatatgaaatgtgtagagagataactattctgatatcatcctcctctcaaccatcctgtgcctcctcctagccaaaatcaactagaaatcagaggcaaggaagccctttgattcagtattcatatggattaggtaaaagacagtagagattggatgtggaaatactcagcacatccactgttatccactcttctgtatactgttcaattagctcagctaacttcacagtcctgaatagaataaaagaactgaagatcagggaggataattcataagctaaagtttctaaaactggaatgtggtcaaaccaacactcaaccataaacatgagactccaagacactatggggcatttttttgtagtaccagcatatgctttatgaagagtcgggctcctggagaagaccgagtaatccagaattagccacagctatttcagacttcagtactgtttcccgctgccatacattgctgtcactgctaccaacctttgcttcatttccaagtcagttgtaacaagtgaggaaatgtattagtggatccagtcttaataccgtgtgtgatctaacagtagccttacagttggtggattgagtaggttacaccagtgaggagtggtgcctagtaataaagccttccatttgtaatacattcttctttgctccattgccaagtctgtaaaactgtgcctggggtttgtttccaaattccagatacctagcacagtatctggtatgtattaaatgttgatgaatgattaaatgaatgaatggacaaccaaacaactacagctatatcttatccccagctttcttggtcagaccctagctagaccataatgctaccagcactgccaccattatcattatcatcattttaaattatacttgatgagcccagaaaggttgaggctgcagagagtcttggctgtgccactgcactccaacctgagtgacagggtgaaaccctgtctcaaaaaaataaataaataaaattatatttgtgcacatacgagacaccaggcactttgctaagcactttgtgttatgatcttacttaattatttctacaactctgtaaggtttattacctctcttttgcagatggagaaactgagatttagccaagttaaatgaattgtgcaatatcacacatataagtggtgaaaatggaatttgaagccagttagactacctctagagctttcacattgaacttctcaactgtatcatctctattccatgagctcatccctgaaattcaggcataaatactcaattaccttggatgtatcctgttttttgtatttcaaattgtcactcttagcatggccttcctactaatactttttcttctttctggagagtagctctctcagcctttctattctgctttgttaccaaagattacttgaattatccttgggtctaaggtctcttttgagcacaacactggacattctagaaacaatctgaggcatgaacctctaaatccattttattctcccaagcttctagatcacttggacccaggtttcttcttttctatgggcctggatcccagcatattccacattcatgattgcccaaggtatttcaagttcaggggcactttcttgcttatactttgtttaattttattttttgcaaaacaatttaagaaaaattaaagcatctgaagagatgagaaagtgcctattgctttactaacctgttcattttcatgaaattagaataaagcattggtagaataatctcttcaagagtatcttagttaccagagccagacacatttgcaaatgcccacagttgatatacctgtagttgggtttagtaattttaaattaaatttgttcatcactttggttgaatctctccctaggagagagagaaaatatcaccagtctccatggcatcaaatctctttttttttttttttttggctttttatagagtcaaacccaatttccattcctcacaatgattcaggctgtgtctatactacgccaacacaactggttaaaaaagggaaaaattcagtgtaataatggtaaagtttagttaacaaaaacctaaataaagtaaaattctatctatttaggagtcccttagaattgagaccttccagattcttaggatttttaaccattaatattagacatatatatatttaaaaaattctattttatttagaaatccttccaaaatgtttaaaagttttatattccaatgatactgaatatcagatatcttcaaatacaatgcatttcaatatgaaacatctaggaatactagacaaaacataagaaacataaccagaagtcagaaatgaaaggaaatctagaacccatagaataagcctctacttactgttgggatgtcctgagaacttgggtttaatgaataaattggaagagaagtccttgggtccatacaaagtggggagttcggcctgacaccctcaaataaaatctttgaaggattacaccttcactgagagagtacaatagaaagagtctgaccaccagcaaagggatatggcacagcatcttgctttctcatattggccctagattggaggaaaagggacagagaaaactctcctctgagagctgataacaattacctaactctaatgcaaatttggcatccaaatttatactacttgaaagctcctagaaaccacaagccaaaaaaaaagaaaaaaaaaagaatcagcatgtggacgtggatatacacacaacagtcccaggttaatgcccctgacagaggttaaaacattcttcagaagggttttaaattcaggtcacaaataaattctccaacatgaatctctttcaagctaagtaagtaaataatagaaaaacaaaaactctagagcttgctactggaagaatgacatatggatcagcagcattagcatcaattgagagcttgttagaaattaagaatctaggacttcccctagacctactgaatcaaaatactcactttcatgagatgctgcataattgaactacaatcatctgttggtacactgaaacactggtttctagacctcaacgtacccaagtccatgaatacgcaagtcccacagtcagccctgtggaagctgtggatattaaaagttggctctctgtatgggtttctcatcttttgaatgctgtattttttatccacatttggttgaaaaaagaactcactgtattaagttgacccacagagttcaagcttgtagtggtcaagggtaaactgtgtacattaaagtttaaatactgctcaaggaaacaagtcaccacaggcaagatcttgcataaagaacgtattagacttccaaaaacctttagtagaggaaataatgaatgcagactaaaacgtaaatacattcaaaattatttgagaaaaaaatacaaggttctaaaataggtaaaacagaacatgataacattgaaaaaaactaagaagatacgcatagagagaaatggaaaacataggtatttaataataagaactaaactcaatataaattttaaacacataataaggcacagctgaagagagaattagtgaaccagaaagtaaatctcaagaaattatttataatgcaatacatacaggcaaactgtataaaatacaaaagagagattaggagatactaaggatcttatataagatataagatatcttatataagatataagaaatgtttaaaagaaattctaaaaggagagaataggaaaaacatggggaaggcaatattcacctagaaaataaataagaacatttcagaattgtttacagaccaaattttagattctagaatcacagtagatttgaagcaatataaataaaaagaaattcactattaaatgattagtaaggaaacaaaatctcaaagataaagagaacatcaagagagaaaaacagaggttacccacaaggaaggttaatcatatgaatagaaaatttctcagcccagtacagtggctcacagttgtaatcccagcactttggtaggccaaggtgggagggtcacttgaggtaaggagtttgagaccagcctggccaatatggtgaaaccctgtctctaataaaaataaaaaaattagccaggcatgttgatgcatacctgtaatcccagctacttgggaggctcaggcaggagaatcacttggacccagaaggcagaggttgcagcgaagctgagatcatgccattgcactccagcctgggtgacagagcaagactccatcttgaaaaaaaaaaaaaaaaaaagaaagaaaatttctcaacagatcagaagaggactatctctaaaatgaaataaataaataaaaactctcaacctcaaatatcatgtcccattaagcactaactccaagataaacataaagattttttcaaacatcaaagtctgacattatttactactagcaaatgatactaaatgaccctcaagacttgctgcaagctgtgtctcttggaccaagaccagcagcatggacattatctgaatggtgttagaaatgcagtatctcaggtcccacctaggatttctcaaagtttcatggctgtaagtcacctagtgatctcgttaatgtgggagtttgtttctttgtttgtttttagagaaaggatcttgttctgtcacccaggtgggaattcagtggcactatcatagcttactgccattcaaagtcttgggctcaagcaatcctcttgccttagccttccaagtagtgaagactacaggcacacaccaccatgcctggataaattttttattttgtatgtgtgttggggggagtgtgtctcactatcttgcccaggctggtcttgaactcctggcctcaagggatcatctgccttggcctcccaaagcgctggggttacaggagtgatccaccatgccaagccatagtttctagattcaatagatctaggttgtgatatttttgcatttccactgagctcccaggtgatacccatactgttgacccaacccaaccaccacatttcaagtagcaagactacttaggaagaaggataatgcatccacctggaaataaccaattaccaagacaacatgctgagaaaagagatggtaaacatgtgggtaaatctaagccaaagtgcacataaaacaacagtaagtaatttgataggttaaggaaagcaatgttgaaataaagtgctagaaaacaatgatatttgagatgaatataagacaataaatagtttaaggtctttataatataagggggaatattattgattgatctttaactttgttaagggaagtaaaatatattctatatctttcaaagcaataaatggtaaatgtgtaatatactttattaactttttattagcaggtactagtttatctcattccacaatattctttgaattaaatattttttctgttcacaaccctgctgccgttttgtgattctttttgtttcttttctctttcgtctcaattttcaagaaaatatagtctataataaatgcctcaatttcatcattacccacacctttaatccatgccatctggcttcttcctttactgccttaaagaaaacaaaaacaaaaataaaaaaacctttttttttcttttttttttttgagacagactctcacactgtccaggctggagtgcagtggcacgatctcagctcactgcaagctccacctcctgaaaaaaccctcatttttaacaatcaccactggcatcctagtaaaaaaaaaaaaaatccaacagctcattctttgttaatccttatcaattgttctaaagtcttcctactgaaggtgtggtctgtggaccagatcattattgccaactaggagctctggagaaatgtagactctctagacttacctctggcctacagaattagaatctgtagtttaacaaactacccaagtcattcttatacacattattgtttgagaagcactcaggtaaaatatttgacatcgtcaatcacatataagtgttaaaattttctcttatcttccactttccttattgacttcttaatttttaaaaattatctctagctcatttcctcctttcatcacaaaaaagcaggtattcttcaaagtcattagtttggcccttacttttactcctattttctccctcttgataatctgctccagttaattacttccattattttcttagagaagaatcacctagattgcttcttaataaaatttcagggcctctcactggggcttctaaaccagcatgtccagtttgggacccaggaatatttatttctaaaagacctcccacacgctaccagataattcacacacagccagcacacacatttttatttgggaagtagtatagttgattagaaggtagttctaatgtaggtctctaaaattgactgttttcttagtcatagtaggctaggtagaaataaacctccaaatatcattgacttgaagaaagaaaaacttgtttcttgtttgtttgtttgcttctatcacagtccagtactgaagttggcaatgcccctgaatgtgattcagggatatgagctgcttcctttgtcggactttggtttctcaatatacttcacttccaatcatgtgaattgtgcaggaaggagaaagtagaatgatgcataagttttaactacagctctggaaatgctgtaccttgcctctgcacccattccttggccaacctggtcacatggctgcaaatggtgcaaagaatgctggcaagtgtgctctttctgagcaacaaggaggagcagctggaactggggagcatcagctggtctttgccacactgcttaatctttggtcttcactcacccttccaactgtccacagggtatctccacttgaatatttgaccagcattaacaagtgaccacattttcaacaaaagcaaaccctgattctccatgaccctttttcagcttgaacgttctcttaaatgtattaatattacttttgccaatggcatcaccattctagtcacagaggttcaaagcctggagatatcatcccccctccctcacatgcccacactatccatttgccaagtcctgttgcttctgtctccaaaatatttcttccaacctcccactcagccacattctaagtggcattactcaattctggcccatgttatctctttcttaaagtattcttctattccacgatgcagaacactcttagccaccaattctcttctatgctctttcccttatatggctctacaattctcactggctctctgctgacctcctttgtaaattataaatattacctaacaatcccagagtgcaaattaactaccaggcaccgggataagtacttagcatgaagggaatgttattgtcatctctttttcaggaatagatgaataagcttcaggggtaaagtaattttcactagctggaaagtgaagagtaaggatttaaaatatgcatcctagtcctcccttatccatgggtgatatgttccaagacccctagggaagtaccctgaagtcattgaaggtggaaaattctcccctttgtggttttcctcactttgtggtgtccatgtctgtgtgcttgcttgctccccgagctgatccccaaggcagaggccatgccatatttgtctttaaattcttagtagctaacccagtgttaatacaaagcaagagctaaataaatgtttatttattattgactttgaaatgttgaaaaagtattcctactctcttgatttactttagaaatgaaaaattctgtttttactgtttttctatttggtaatattgggctgctgaagaaaattcacgatcaaactgattgcctctttttcaaattataagtattgctattcttcatgactcctttaacatacataatagtactcttatacatcttttatataacttaagtcttccattaaaagtttattccatttttttttaccttattccatttctatatatgtctacaacaattttcttctgtctttcccatgtcttcaaatcttcactggcactttctaactactcaaacaacctatcaatcaacacatccactctttctctcttaaaaacaaacaactcttaatcctacttattgcctcgagcctcttcttcctttactcacctgtttcctagtgacagtaacctacactatctataatccttcacaatgtcataaggcttttattctataaagaacaaaacattttgagtaatacttatctgaaaaactgttaaggctcacccattcaatatgaaattgatggttacacaagaaagaaacatttctagtacaagctataaaacaagcatcattacatagtatcacaaaaggggtggaaaaatctgttaaacatgagcatgaaaatgcttaggattacagtgtgtctattacagaatcaaatgcagccttcttgattaaactagttgtatcatcaagaaacacaagaagagtgtgctgctttacataccctttcacgacgccatgttcagtgatgccacattggtagcaataaatcacccaagaaaattagcaaacactaaaaaatctgtatttggtttattgttttgttgatttcccagatttaagaaaataatagcagaaatgttaataatgtaaactatcataagtgttgttcctgtagctgttatactacagctagcacaaaaacaaaaatattttccagtacttaaaagctgttatctaattcagtaaacaattagttcacatcattgacaagtaaataaagctattacatacacacacacacaaaccaaacccaaccccaaaatccgtcagtctcatattcagcctcatattcaagtaggccaatatacagacaaacattcttcactcaccaaacaagaaccaagtaatgtgttttgaagtttacaaagacaaactcttctctctccagcaatatatttgtgccttactggttaatttcttgggttttgtaattcgatgcctgaatgcagaatcccaactcctccatttattgactttgaaatattgaaaaaatactcttaacctcttgatttacttaagaatcctcctctgtcaaataaggattacatttcctgccttatgaaaggcagtgaatactagttacaattgccatgtaccaggtcactgaacaaagcctactatgctgaagtcagtggtgaattcctaggttgcaagaattgacttctattattgctactgttgctttgtttttatgctattttttgtaaatctcataactatactatgaagtgaagacttgcatgttcttcaattatcagttgagcttactatgcaattggcatttcagacgctggagacacatcggtaagtatgacatatgaacttcttattctagaagaactaatattctggccaagggaggtagacaataaaaaaaatcaataaaacatcaggcagtaaaagcgctggtcagattaaacagagcaatactgtaaggagtgattcagtggcaatcacagtgattgtcaggaaatgtctctttgaagagatgaaaatgtggactccatccatgtggtgggcaggacagtgatgcttcaccccaccttaaaacggacacatcctaatctttggaagttgagaatacgttactttacatggcaaaaggatatttgcagatgccatcaaaataagcaccttgagctagggagcgtatcgtgggttattcatgtgggtccaatctaatcacatgccttcttgaaatcagcagaggtttctcattccctcgctttcagagagaaatgtgactgtgggagaggatgggagagatacaactaaattggctttgaaggtggaggaaggggaccgtcagccaaggaatgtgggtggcctctagaagctgtgaaaagtcaggaaatagattcttctctagagactccagaaaggaatgtagctctgctgatacctatattttggccagcaagacctgtgtctggtttataacctatagaaatgtaaaatggtaaatttgcattgttttaagccactgagtttgtgataatttgttacagcagcaataggacaccaatgcaggctggaatgataagaaagaaacttccatgaaaatgatggcacagctttgtttgtaattggagcagctgggacaaagcccctaacactggggtaagggtgttagagagagaaacaagctgttgtgattgaaatatgagcaatgggaagtctatgaagtcagaggtaggcgggagtcagatcatgtagggctttatgagtcattattttattctaagtgtatagggaagctttggaggttcatgattatatttgtttttaaaaagttactcttctatggaaattgaatatagatggcaatggtgaaagcagggatgctggttataagactaagaggtacacataaccttttggaaatatttatgaccatttggcagggtagagttgttagctctagagtagaaaggaaaattatcataacctttataaataaaaattcccctgcatctcagggcagccaatggaatgtgtgacgtctaagatgagcaggtgtttgtggaaagattctctatgtaatctatgacctacaaggaacatgtggtaaggcctgtcaaaaaggactactagcaaagctaattatctggttccatttatggtcctatggccaaatgttattgattagaagtagcccttaatttgtgaaagccattatgttaagccagttctttattttcctttatttgaagaagttgttctatattcatgcttatgacagtgttaattaaaacagaatctgtcaacaaataattttcaaaatgtcaaaaagttaacatctatataaatataaatgcatgtcaaagattttatttaacattaactcattaactaatacagtcattattaactaatgagtcacataaatggaatattgtgactgatttaagcacataaattttttaaaaataaaattgaattttacatatctgtgtgtgcacatatacacatgcacttgaatttgggtacatttcttgaggttcacaaacttagcaaaagtccctgatatttggcacccgtgagccagaatcaagcccttaagataattttgcaggcattgcctccaaatacatagatgtgtgttttctgtgtcacaaagtaaaatgcgttccttaccctgggttgtcatttaaacaatttgaaatctactgaaataactcttccatgtctgttttttcagtcatgaaatagagatagtaaaaatatcttatcttattattacaccatgtagtattgagaataaaaaaggataataaaaaaggctgtgcataaaagcatataactgcacagtaccatgcaaatgaacaagtgattattagtactaatcctattattatgacaaatagtactaatactgctactactctttctatttcgctactacttctgttttagataagatgtaatggacttgtaaacttccatgctcatgcttcagaaagaaggaaatggagcgaatgagtctgtgcccttcctttctttgttttatcttctcctccctaaatcccagcccacatcctattctgatatactgctgaatatttgtaaaagcaaagatgattctgatgttaggaacatggctaacacatacacaaatcattgaagaaggaattgatttgggagctaattatttacatatttcaaatagcctttatcatcctaaatagtaatgatataattacgcatctgctttgtccctctgactaagaacctcttaagaactcattcatcctttcattccgaacacctaacacaatgtatgacataagatatacactcaatcaatcataattgaataaaaaaataaggagttatcattttttttcatacaacatccagagtgagcttttaaacatctgagcatttcattccttgccttaaaatactctaaacagattccctaatgggagttggaataaaatcctgaattgcagggttctatgtggtccagctcctgtccacctctcatattttttacactgcctatcctgaccatattagccttctttctcacatgtggggtgcctgttcccttcttaagccattatagtggttgtcctgtctgcacggattatctttttgtttgactatttcactaatgctatttactcattttctctgtccttgcacctagaatattttgcagatgtgatcattttaactactttactcactattcactcattagcaaaaaataatatatctttggagtattcttttgtctgcggctgagtcacctaacaactgtctaaacaactgtcacctaaaaactgctttaaaacatctctttccaaagtcatcttacataaatgagtattcataagaatatgtttcatgactttaaatgtccttttttaactttacattctcttcattctcttggctttttttttctacagtcttattcattgtgtatacttttatcaaaaatattctgccctaattattgtttctggataactttgagaaaagaatgtcttttgtgtctttagatagactcacagaataaaagaatgttaacatgttgagtaattctagcagttagaagcttttggaggttgcaaacatttccatatccactaatttcagcagttcactaatggaaatctatgcataagaccactagaaatccatggaccatagactaagaaattttgttttaagttcaacaccctggcattatacgtgaataaaatgaatactagagaagtaaagtaacatgcccaagaacacactagtaaaaagggtgtctgactcctaaaccattagattctccaccgcacagtactattttgtaactaggttgtgactggtttagaatcaaatttggggtacttttatgccaaatgagaattctacaattaatacacctttagcaaatagtttttcttgttgtttgtttattttttagagtctaggtcttgctctgttccctaggctggagtgcagtggtgtgatcatggctcactgcagcctcaaactcctgggctcaaaggatctccctgcctcagcctcccaagcagctgggactgtagacatgcaccacaatgcctagctaagttttcaaattttttttagagatggggtatctctatattgtccaggctggtctcaatctcctgacctcaagagatcctccagtctcagcctcccgagttgctgggattacaggtatgaatcactggaccagctacttttcttatcaatctattggtatatgaccactatatgtatacactagattacatgcctgaatataaatatttgaagatatatgtgtttgttctctgataaaaatgaaattatgtcgtatattatctatgaaaatcttgtcactgagaactcttaagctctataaagaaagaattttcctatttttctaaaagattactcaattattgtattgaagcaattcataatgcaattaaaatttgatttcaactcatatggaaaatttcctttaaaaatcctattcaaattgattgaatagtctaaccaatatggataattgatagtttgaattccccaatgtaatataaccagttgatttgggatgcattctcgggaaacactagtaggagagataattagacagagaaataaaggaaaccaataaagtgtacattattcagctagttaccaccataggtggttcgagtttgatcttactgaggaactcttaaaatctggtttagaatactttagaactacccttcccaaccctaagaaataggggatgagggatattcatgccctaacttttattattgtctcatgactgattctggaccattcactttctgacactcccaggttacctttgagcagagtcttaagtgtttataataacagtaaggtaaggttataaagtaattctcagtaaaacctcaattgtgctaaggttatacaggtgtggcactggcagtgcatgccatattccatctctcatagctgtgtaatatagatcaagatcaccaatgtgtatatgactagtataaactaagctgctccactgtaaacacttagtacaatattaaattttaaaaaatcaacccctctatccacacaataattagaaatatatttaaatctcaactaagtttctgcttccaggtaaattgtagtaactacacaacactctgtttcttacacttaatgcaactacgaaccctgaactgaccaagtgcatggagaagttatttaaaaactacagaaagtcaatagaagaaggtaaattgtggggaaagataagaattcaatatatcaccgaacctatggtgagtatacaattttttctccaatccccaacctgaatgcaatacaacctcaaaaccagaatggacgttggcacagacagggagagctggaggaaaagaattccagttctgctttaggaaagggaaagagaattgttaatgaaagataatacagtaaatcctatttgtttatttttatttatttattttttcttcattctttcacccttcagtccaaaagcaatccaatgttaatctactgggggcaagaaagagccaaaattctagggagggatcttttactctgattagcaggctgtgatcccaaaggggtggggaacctccctttgtatttctctctctctctttcaatgtattgtcccaccttttagaaccagtgtggaggcaatcatgaaagtgcataaaagaacacgggaattaaagcccagctttctgggcggaggactgaaaagatgagcctcagtgaaaaaaagaaaaaaaattaccaaggagatcacagagacgttagagctcagaaaagtgacctcataaaactgtttataaactcctgggataactctgacctgtgatttcatagatcttattcaagtcatatatcactttgagaagtgaaccaagagaaaggccaccacacacataggacatatccaaatcataaggcaaagactttgaaactcaaattgacttcataactacagtttgtagacagaggattagaattttctgcttgaacctatccaggttaattgcttactaaaagaaaacaacaatcaacatttttcacaagaataaaaatagacccaacatctcattacataatattcaaaatgacaagcatatgatcaaaaattaataagcatattcaaattaggaaaatctcaactaaaatggaaagagataattaacagaggccaccactgagataacactgatattggaattatctgacaaatatttaaaacgagctgttatacaaatgcattgaaattcaaacaagatttctattgcacgatatgctcaccaaacaccattcttcaaaatagtcactctttatgtagaaaactaggtattaaataaagttttctagtagaggggctaaaaattgcatttcaagtggtttatgaatgcatttggcttaatgctctcctttgagcacccaaaatctccggccatctttcacatttgtggaggaataaagggcctcagtgagatggttatgaaaggctgttggatttaaggatgtgaagaagttggaggtatcttcatcatccacttttcatctagcaatttcaggctattgctaataaaataggcagaggtggccgggcacggtggctcacacctatgatcccagcactttgggaggccaaggcgggtggatcacgagtccaggagttcaagaccagcctggccaagatggtgaaacctcatctctactaaaaatacaaaaattagccaggagtggtggcaggcacctgtaaacccagctcctcaggaggctgaggcagagaattgcttgaacccaggaggcagaagttgcagtgagccgagatcatgccactgcactccaccctgggcgacagagagagactccgtctcaaaaaaaaaaaaaaaaaaaaataggcagagaggcagacgtaatccttcagccgccctagctgccacattcattcctcattcctcactccagctcaaacacacctcttatcatatccagaggcttgggatcataatttcaggagaccacagtagaacagagatgttagatctgaagcacatcccgatccctgaatacaaaatacatgttatcagtcttcctgcttgcagtgcaatgtaacataatccagcctactgatacagtatttagccattaattccatattcaatactgactaaaacagcccaaatcaatactatccatgaaggcagagggaaaatcagtaatacaatgtctgtatgtgatagctcatttcttatttcacttgattatcataaaggcatattttgcaggccagaactaatagggactatttcagttaaagagagttgttgtctgtctgtcttttgcttagtaatgggttaagaggaagaggttctggtttgggtaagctttcaggcaaacaggagaatcatagtgatggtggtaggaggggaactgttctatactgtctgttctattgagtaggacttaggcttctatggtacaggcagtgaaaaccaggaaatgaaggagttgttcacaattggtataaacaagcatatataggcagagttgttgcaacccagtatcttgcagcttgataagaactgaagctttgagaacatctatgaatagcactcttgtcctagattttggtattctttcacagagttttcaactacacatgtgctctatcttttgcgttccttctaaagtaactagaagacacttggcatggagataaacactgagattgttcttcattcatagcaatgctcgaacgttgtaatttgggcagtaaagcccttagtggctaaggagaaaggtgcagcatagggttagcctcttccaaacagtataaatcaaagtggttgaaagaggttccccataggaaaatcaaggagggagaataatcacctttgggcagagaaaaataaaagatatgtactataatattccattaagtcacctaattttgtgacttcagatgatttgctttacgttcaccaaagctgtacaaaaggggctattatatttatcagtagagtcagtttccgaaaggctaatatatatttacaaagtataattttcgaaatgttaaaaacatggctctcgtccaacagagcataacagtgagcaatgttaggtctctttagatcactaataagggaaccagtggaatgatatgctcattcaaatgagactgtgagacattgtcaaatatattactagtggaggaaaaagaggctgcagtaagatggcaacattagatacagaactgattatcgtaaaggggaagaaaacggtagcattcgaggctatctggactacagaacaaaaatatttgcatcttttcaattctttacaagttgacatttgacattacagaatgcagaacataagcagtaacaaagagtaagtcaagcacatgtatattccctggaatatcagataacccttaagcaagctgttaaacaatgcttttgtatgatcttgtaatatttttgctatataccaaaattttaggtcttttcataataacctttgtttgtgatgcttcataggtaattggcaaaatgttagctattttatgaccacactaatgttaaacgtgaatgagatgacacctcataatgatttctttttatcttttccttccatgtatatttctcattgctccacattcaccttcctcaaatattatttttatgcaattttctaatgcctattataggttggggcacataataagatcctaatacatgctcattaaatgtaaaaaaaattaatcccctcaaatttcattggttacacagtgcctacagaatatttgctatttttttaaatcaaactacttatttcagatagaactcttagtcacaagaggttcaaaccacctcatacttttccataatgacatattttactgtgcagatttataaattgaattataactaatgaatgtaataaaataaaaattactcatatgatattgtactccaataaaataggtgagtgtatttttctaatatttttatcaagactatctaacaaaagaattaagacccctcattaagtaataaatgaactaaggctgactaatgcttagcaaatatctggcttattaattgaaacttttactataataacgatattaatttcacctaatattactgatcatttactatatgataggcatatgctatgtgcttttaatgcatttcccccactgaatatactgaatgtacagagttattgtggagagatgggaaatgtatataccttcaagtcagaagacctgagtctgaggttcaaaaacagtcatgtgtcacataacatttcagtcaaccacaaaccacatatacaatgaagttccataagattataatgccatacttctactctaatttttctctgtttacatacataaatagttgccattgtattacaattgcctacagtattcagtacagtaacatgctgaatgctgattaccatttgtaagctaaaagcaacaggccatactatacagcctaggtgtgtaggaggttatgacatacagatttgtgtaagtacactctatgatgttcacacaacgataaaatcacctaacaatgcatttctcagaatgcatctttgtcattaagcaatgcatgactgtacttagtttacaaatcccttaaatacttaaaattgttgtctccttggctgggcaacacggtgaaaccctgtctccactaaaatacaaaaaattagccaggtattgcatcgtgcacctgtaatcccagctacttgggaggctgagacaggagaattgcttgaacctgggaagcagaggttgcagtgagccgagactgcgccactgcactccagcctgggcgacagagcgagactccgtctcaaaaaaaaaaaaaaaaaaaaaaaaaaaaaaaaaaaaagaagaagaaaataataaagcaaatcccacttacatcccaaggtcaatgcacagactcccatgggaaagagtgagctgcatttgtatggtacttcagagagttaaagaaatttcacgtaagctacttacttccagtttattgctttttccactataggacaagtagccatcttcttttaggagcatggggtcttaggtaatatgatttagcatatccatgtaggtcctaaaacaatggttattttccacctgaattggtattattttcatcaatataatcccctctaagaaaattgtcctgtggatctttttgttaattctttctttctctttctccctttcttcctttcttcccttcttccttcctcccttcctgccttcctgcctgccgccttcctgcctttctttctttctttctttctttctttctttcttttttctttctttctttctttctttctttctttctttctttctttctttctttctttctttctttcctttcatttccttccttccttccttttctttctctctccttccttccttcctttcttccttccttcccccctctctctctctccctctctctctctctcctctccccccaccccccttagccaggcccatagcccaggctggcatgatcttggctcactgcaacctccatctccctggctcaatgcatccacccacctcggcttcacaaagtgctgagattacagacatgagccaccatggctggcttgtgaatgctttcttctacccattgaagagtcagtatgcagtcttcttgatgccaggacaaacagcagaaagtcaaggaaaatcatatgcgtcaagtcacttaaacaaataaatggcaactataggaaaaactaaagccacatggcacgatgagatctaactggaatctcacacagaacaagtaattttgcctgaggaaggtaacttcactagaagacttacttcccatatcagtttgctaggactgggataacaaactactacagactgggtggtttaaggagcagaaattaatttcctctgaattctggaggctagatgtctgagactgaggtgtcatagggtcagcttcttctgaggcctcttgccatggctagaagatggccatcttctcattgtgtcctcacatagttgtcccttcacctgtattttctgcgtcctcatctctcttctaataaagataccaatcataatagattagtgcccacgctaacgacctcatttaaccttgattacctatttcaagactctgcctccaaatatagttaccttccgagatattgagaattaggacttcaacataggaattttgcagggacacaattcagcccataacacccccaaaatgatgccttatttattagtctgggtttataactttatatttcttctcactaacattaggaggttcttgactcaccatgtgctattgaacattagatgaaacattggattataaatatagctcatgttgcaatgatgccaggcaacgatgtgtgccgctgaacagtcatctcagtaaactaaagtgcatgcgagatgttcctttcaggatttattgtttggagaacaagtggaaattctgtttgatgagaacttggagcaaacgctttctccagtgctgacctggatcctattcttggcaatgctcagagagaagaagaggatagatacatcactgagatgttgacccaacaagcattcttgtcagctaccttcatcagaattgaaaccacatctgaagtctctccacagaaggtataccaccgtgtggaagccaggcatagtgaccctggttgcagtgccttccacttaaaagcaccagtgcctctcaacatcttcctctgctatttacggttaccaaagaggaatatatttactttttgcagattgttctgctgtgttctcttttctgtcttactcacactttactggaaagaaaaaaaaaaaaatcatgcttcaagagcttcccctctccagtcacccaaaataggaatttctatcattttgcagtttccaaacagcagcagatcagaatctgtttattctgcaccctgaggaacagaacaagtcagactgtgactgtgtctcattaattttttctgtaatttcaaagaagaaatggaagagaagaatcaggctttaggctatgcaaaaattgttcagcatggtaaataaatcagcccgaatctattaaagctcttttgggctacaacaaagcaagcttgcaaactgatggttgtatccctgaatttggtaaagagttgcataacacatcaggtaggccaaaaaagcactgataaatcagtctttactaaacataaaacaacttggcaaagttgaaaaagaaaaggaagaagctgaaacgtgtgcatgaaatttccacattaaaaactcattggtcttgcctggatcctgatgcaatttgaaaggaaacagacaattctataattttagcaaaaatatttatggtacagtatacaagttcaccaaaacattctctcccaagttcttttaagaatcagcattccttaccccagcggagaagctgctaaaacaaatttattttttgttcatttcagaactttctggattctaactatgaaaaacacaaatgcttcaacccttcccacccccatcaccatcaaagaactctgtgaccacatgtccttccctatttctttataccacatattagagacgaacatgtggcttgacatacatgatctttgtaatccagatcagttggctagcagttcaaagataaggtcaacaatcaggttccagctctaggagaaaaaataaggaatttaaatttatggttttaacttctggccctgtgaaatctccggaaactccagattttgcaatatttggaaataagaatgtttccataatatttgcatatttgcaaatacaaatgtgatgtgtatacagtatttggaaaagtatatgtaaatttatatgatgaatacataaaataaatatataagtgaattattatttacatcatactaggctattgtaaagtttggattaaagagaaaaaggtatgtggaaaattaaattcatttattggttcattcattcaaacattcggcaagcatttattgagggtttattttttgccctgcagggtcacaacgatcaacttgaagactctgcccccaaagaattcagaatataatgagggagctagatgtgccagttgatgtttagcaatcactgtgttaatgctgggatagaaggatgtaccatggtgtgatgagggaactaaggagaacagattaaagccagtcaggcctgtaatcccagcactttgggaggccgaggtgggtggatcacttgaggtcaggagctcgagactggcctggccaagatggtgaaaccccgcctctactaaaaatacaaaaattagccagacgtggtggatacctgtagtcccagctacttgggaggctgaggcaggagaatcacttgaacccaggaggcagaggtttcagtgagccgagctcacaccactgcactccagactgggtgacagagcgattctgtctcaaacaaacaaacaaataaataaataaataaataaagtcaggaaaattttaacaccttaagaaaagtccttgatttttaatgtttaaaaattgacaaaggctaattttaatcaaacaagggagaaataaaaatcaatagttctccttggaacttctcttataattctcacatttttatacctctcatcaagaacatctctggtcagaagcaaaactaattttcatttatgttgtggacagtttttaaagtggttcctagttattcccactcttggtactatacccacttcatatccccttccccttaaatgtgaggggaacctgtgatttgcttataatagtacacagcaaaggtgatgggctatcacttccaaaattatagtatttaagctgatttataagttgtcttgctagaagactgtattcactactagcttcaataaaggaagctgctatattttaagctaccctacagagaaactcacacaagaaagaaatgagggtaacctctagccaatagcctgcaaaaactgaggcccactgtccaccctcaacaagtgactgaattttgccaacaaccacatgtgcacggaatgggatccctctccgaatgaaccttggaattaaactgcagccccagcaaaaacgctgattggagccttttgagaccttgaagctgaggaccagctaagctatgcataaatgtgaaataataaacgggtgttgttttaagttgctaagtttgtaataatttgttgtgcaacatgagacaatacagtctacaaaatgcaaaaagaagaaacctaaatacatagattctctgcttcataaaagttattacttaattcgctaaaaacaatcattttaagcacaatgtttttcagaggaatccgtataccataaggagagatacacacatttctactgttaatgtcctcaaccaagactttactcaattttttagagcaaagatattctggcctcaaagtatacatatgatcatgccctttctattcaactcccaggcatcggcagatgatacagcatgtcttggaactccatgtgtctttttttgcacaatacatttctgaatgcaaaactcagcttttctccagagacacctgagaattatgagagaacccgagagctgaagcaaactgtaactttaaattccattaatcctgcaggttcttaacacccttatttttgagaagtattcaactcacatagttaaatataggtgaatctataaaccagtgaccaataaacttgttctataaaggacaaaggtaatggttaattttatgtgtcaacttactgggctagggaatacccaaattcctggttaaacattacatttcaagtgtgtctatgagaatgcttctgaaaaagtttagcatttgaattggtagactatgtaaagaagaccacagtcaccaatgtgggtgggcatgatccaatcccttgagggcctgaaaaagtctaaaaggtggaggaaagacaaattagctctttgtctgagccgggacatccatcttctccttcctccaaacatgtgcactcccggttataagctttagtactcgaacctggatttacactgttgcctcccctggtttccaggctttcatacatgaactggaactccaccaccagacctccagcttgcagatgacaaattgtgggacttatcagcctccatataatcatatgagctaattcctcataaaaaatatttctatcaatcaacctatctatctatatactattggttctgtttctcttgagaaccctacctaatgcagcatgatgtggtttggttctgtgtccccacttaaatctcatgttgaattgtgatcccagtgttggaggtggggcctagtgggtagtgattggatcgtgtgggttgtttctaatggtttagcaccgtccccctagtgctgtctagtgatagagttctcatgagagctggttgtttgaaggtgagtggcaccttcccctttgctctctctctcctactggccatgtgaatatgtgcctggcttcccctttgccttccaccatgattgtaagttttctgagggctccccagaagcagaagcctgtacagcctccagactagtgagcaaaattaaaccttctttctttataaattacccagtctcgggtatgtctttatagctgtatgagaacagactaatatacagcaagatagtaaatactttaggctttttggtccatatggtctctgttgcaactactcaattctgctattgtagcagaaaggcagtcttagacaatattaaacaaatgagtgtgatgacagtgtttcaataagttttaattctgtacattgatatttcaattgcatatacttcttacatattaataagtattgttcttattttaatttaaaaaatcaatgaaaactgtaaaaacattctttgctcacaagaaatccaaaaacaggaggtgggctggattttggccagttagctgtgctttgctgatccctgctcaaaatcagtcacatagctattagggtaccccttagtgcagtaagtggcaatctcagtgacttttaatgattataatattttcaaaattcagttaattagatttaaatttaacaaaaaatagcatggaaaaataagaagcagtggcagattcaaggaggaggtcagggaataaggaagcaggatccaaggactagatggcatctcatatcaaacaaacaccaacagggcattgcactctaaaaagaaatagatttattcactagactttgtgtaaaatctataattgtgatcaagttgctagggtaggaattgattgatttccatttcagcatatttgtcttcaaatgtgcagaaagttctcctggctcccttcaggattaacatggggtttggaataaagtgatagacacataggagcaggccacaaagactagctatgctcctcgtgctccagaattcgagttcttggtcacacttctctcccaggatgtttcatcctgctggcccattcatcagactgaacaggagacaactatttcagcctgagacggcccaggcttgagtaggcaatagcactcgaagacttggaaggttgctgctgcttttttggaaaaatgtgaaactttttctaatatgtgtgaaaagacctgttaaacttgaggaaaaatcaccagctactgagtaagcattgccttggtaagccatatgttttcatgtttctttctgagtctcaaatcactcctttagttttaagctttgtcttccataagaaaaaggaaatgggaggcaggaagtagcagaataaggcagctgacctttgaataaagatctaagtggtctcaaggccccgtccagttacaagaatggagccgcttcccttgcattactagaataacccaggcctagatctctcttcccacttctaacatgcctaaggctcaggctgtgctttctgagagttggtaataggtatgctccctcattcttttgtgaggaatcacctatgttgtctttcaccttgggcgcccatccaataagaagctcatcttgaattcccctcccaaaaagtgaacgatttaaaatagctttcaaacagactctaatgacaatgtctcacagcatgtcacacgtttgcggtcgtcttcctttatagcaattataattaaatcaaacagtggcaatggtgtgttttttaacagtaaagaaaaataagcaaaattaaagaaaaataagtcagaaacatggaagaactatagagaccatatttttatctctttggattctgtgtgcagaccggtgtttaagccatctcccaaaagttagtggacaaatctcaatgagcttagactcacactgggaaacatgcggagtgaagacgtcattcctaaggtttattttaaatcctccactttgtaattcttgacagtggatgtacgttgagacattagcaaatgacgtgtaacttcaaatgggaagatcccttgtccttcctgagaatagagttgcatgtgacacactctccaaagaaattatttttgtcttcctctacaagctaaaggcctagattagaatcgggatactgggatagggttacagattcttaaataaacctggaagggatttaagagagcttagctagaggatcactaatcttgggaatgacaatcctgaatgtcctggtgatttgctgcaggttgctcagctacttaatggatgtgctaattggatcaaagacttatttctttttcagatttcaaaagtagatccatcaggtttcttttattccccataaatgggtctttatgaagagaaaacagactcctatgttaagacaaaaacaaaagaaagaattaatgctgcttacctttttccttgacctaaggaagaaaagtagaggaatatgaagagaacagagagagctgggtcactttgttcctttacttagggcagatgggcatatactgataatgagaaagcagggtggacactgttctgaaaacccctggggctcctagaaactggtcttgagttttcttgttacagagaaataataattctgtgggcaggtctcagcaagtacaacatcagtggcaagaaggaggtaagggccctgtcattttaggatgctccagggacagaatgccatatggtgagtcttgatgggggtagtctcactcccttttgagagagttaggcaactgaatctgcactgccaaagtccaggtgagtcacacttattaaaaaaatattgtcggccgggcgcagtggctcatgcctgtaatcccagcactttgggaggccgaggcgggcggatcacaaggtcaggagatcgagaccatcctggcgaacacggtgaaaccccgtctctactaaaaatacaaaaaaattagccaggcgtggtggtggtcgcctgtagtcccagctactcgggaggctgaggcaggagaatggcgtgaacccaggaggcagggcttgcagtgagccgagatcacgccactgcaccccagcctgggcgacagagcgagactctgtctcaaaaaaaaaaaaaaattgtcaaatatattcacattccatttcaaacagcatttttatgacagtaaactgtttcattatagtgcatttacaagcagctgttttgtacttaagttctataggttataattaattgtgaagacagtttattgaacaaaggaagggattctcctaataaattggcagatggaaggggacatgctataaatcagagacccttaactttgtatttgtgaagacaggcagtactcttttatgctacatgtgactcctaattaagtgatctttccagaacaccaagagtcaagtgcagtcggacagattgtgtgtgctatagccctaccctatcgatcttcattaattcattcactgtcttactccacagaacttgataaacttataatatgatgcataacaaaaaggaaaataataaatactaggaggaatcagaccaaaaatcaagtataaagacaagaacaatgataatgttaactaatataaaaatgaataccatagcatgtagtattaacgttagacatggaccatagatttggtttaagtttcctagtagctcttggataatcaacatataatgaactgggcatggtggctcatgcctgtaatcccagcacttcgggaggccggggcaggcagattgcttgagtcagtccaggagttcaagaccaacctgggcaatatggtgaaaccacatctctacaaaaaatacaaaaattagccaggtgtggtgcatgtgcctgtagtcccaactactcaggaggctgaggcaggaggatcgcttgagcccgggatgtcaaggatacagtgagtcataatcgcaccactgcactccagcctgggcaacagagtgagaccctgtctcaaatatatacatatttgactgcataaatgtgtgtgacattatacgtatatatatataatgactgcataaatatgtgtaactgtgtgtgtgtttgaatacatcactgtgtgtgtgtgaggatgtattaatgtgtgagcatgtgtgcacatgtacgaggacacatgtgtatacacacttgtgaatgcatgtttatgtaagacactatatgtgtgagctgtggttatgcataaagaatgtgcatgtgtgctccaaagaaacacaactttttctgctactaaaaactggtcatctttgaataaattcagaaatgattttatatttaaacatttacccatgtagacatcttaatgggaataaaatttgcccatgccatgaacaaaatacataatttaagatttaaaatttaaatgcaaggtaatttacattttaaaacctcagatgtaatgtaacttttaaaataggtcttgattatcttattgagatatgacttacactggctaagattaaaatgaactagttttctttggacacatactggccagggacaggcagctatgagaaaatgagacagaagcttcctagcagccaaggatatctattcaggatgtcacatttcttctagatcatcctatcttgatggttagaatgcagcggattattttggttttgtagtagctgaaataatacaggaatcagcatccttattcgtttaatctacagcctcaattttctcacctcaaaaatagaaaggttctatctacattaccttccagctataatcttctatgattctgtgttgtctctgtgttagaaatcaaactcttttcattgtgcttttaatttttttactgtaattatttttattattatttttcaaaataaagactcactctgtcacctaggctggagtacggtgtgcaattatggctcagtacagccttggcctcccgggcatggggtctccctgtgtttcccaggttggccttgagctgctgggctcaagtgatcctcctgcctcagcctccagagtgcctggattacaggcatgagccactgcacccagccagtgggcttttaaacttcacatataattttttttgtctcatgttttattgagaagttaaatgcacaatataatatccatcttgatgaaaggttttgttgttggtaggacaataacagcagcactagacagtattataggataataccatgtaccttgcattgtgctagactgtatgcctaaaatagcctcatctagtcatcacattgtgttgctccaaacaaagaaatggtttctatatctggccaaagtcacccggttaatgtataatttgaattcaaagttcaaatcaagaactataacagggagttcgttaattctacattcccttgaaacaattctttaccaggtactggcagcagaaggctagatagcaacaagagttaaaagagttctgtgtctacatgaatgtgcgtgtgaatgtgagagtattaggggaatagaatagaaaggaccaccaaatagcttacaaaagcagaaatcacaagtcatttcaaaatgatagtttctaccacatcgggtagagatatggagaaccagaattgagaagtagaaggttccatactatgtcagagggaaagtgcattgtgtcctggaacaggtagagccagcatttatattcctgagttttatgcaattttgtcttgacttgctcaggtaatttagtttatttcactctgcagccaggcagagatggaagctaatgagtaagaggtaatatcaaataacccattctaaagggtattgtaagagcaagataaaagtaactaaaagtgattgtacatgaatagagtcaggattgcactggaaatttagaactatttgttttcctctatatgagaaagttagcaaggtggcctaatagctcagttcagatgcatttatttccattgattttcctagccccagcaaacacacctgtgttctaacccatgtgctatgtgttttcatgaacacactgcaataaactttcttgaattctccagaagtcctatctgcagaatggttaaaattttggctccattgtgccaatttgcctttctcctccccaatctctttgggaatatttatcttttatgagttacaaaaaagattcttggccttagaggcaagagagatgaataaattaacccctgtgggattccactggctgcttctggtcatgtcgcctacttagactattcttttattccttatactccatgtatggcatatgagctaatgaggaaagtcatcattcattgaatatttatcgagaaacccagagttcttccattttcccttattactggattaaaaaaaataaaagttgggaaactgagttatgtgacatttggtacttattgggcacattaagatgctccatgttttatggcattgtttctattgtcttctgtatatttcaaactaaaatattaatagttcatgatttaagtcatagtggattccctcaggctatgcagatcactcttatatatgactctattaaggtaaaatttaggatcattaagattagaatccatactctgaatattctttgggcatgtgaatagaaatggaaaggagaacagaatgatgatacaaaaatgtgtgtttcaaaaaatacaatttctgtggcttgaattcaggacctaatgggaattcagactcacaaattgcctgctgagcaacataagataatgtttatggaggtgaaaaagaccagaagcaagagtatgagacagttcttctgcctggggttcaggtggttatgtgcaggaatagtattcaaaatgataacaactggtaaggcagggacaccagcaattggaatgggctctgcagtttctctgaagcaggatactggagggcacatttgttgctggataatggggaggggatggggctaagccaggcatggggtcaatgtagtgggggtattgagagatagtcaaggaactgaggacagctgttacgtatcaagcagtttggagatctctctctctctctctatatatatatatatatacacacatatatatatacgtatatatatacacgtatatatatacactatatacgtgtatatatacacatatatacatatatatatagagagagagacagtgtaaatggtatttatttattaaaaattttttttatttcaatagcttttggggtgcaagtggtttttggttacatgaatgaataatatagtgatgaattctgagattttagtacccccttcactcgagtggtgtatatagtactcaatatgtaattcaatattttaatgaggaatgcaagtctttgagagtataccatccgaatatcagccctaaccatatgcttttttaggatgagacttccctttagagagtgtctttcatctaacacagagctcttcagtgtatccttctgaaatctctctggcataaccttctgttctatggacctgttataagaactcttcacttgctttaaaagagtaattgtttcccagttatcttctcttttctacataatgttaggagtgggagtggaactaagaaacacttgagctttggagtgaggcagacctaagtttgaatcaaagttactatgcatgtgtcttagcacgctatttaataacagagcatctgtttccttagctgtgaaaatggctccttgtgggaattaaaatgagatgactccttggatggtgtctaccacaaagtaggtgttccataaatgtttcatatcatccgttcatcttgtttatataatatctacatcatactgccaatatttattctcaagtctcatctccattgctgtacaacaagcaaattgctagagatgccatgtttaaagcatttcaacttcatttctgccactgcatctggaacagggccatgtatgtggttaatactcaataaacagtcaccgagtgaatgaacaagcctgattttcttggcttttgttcttagtacttactttctatcacttaattcatttttcctttctcctgggtgtactccagtttctccacatccttaaaatgtaagtttggtaaagtaccttccagggacacacgtgtaaagaataaaactgtgtcattggaattcatgaatatttttaaaattttaatttccttagccactctataaatcttgttcacctgggttgactaaagtttcatgctcctttctgatttacactccttgtatacgtgaaatgtcaccatgtgaatcccacagatcctcttcccatcaaaaaccaactgtagacaccaaagttcccccaaaagagtgtcaaattactttactagttccttatatactcacactgagggtcaatccgacataacagctagcagtatagtgacaagggcttcgtgtgcgttcaaatctccatttttaccatttactagttttatgacttttagcaaagataattagccactctatgactcaatttcccagtatgtaaaataaggctaataatagtagctaccttttacagtcatttaaagaccaattagttaatgtgtgaaaggaacttaaactagtaaataattagtactcagcaaaagttagctataattattatctataacaacttttctatatcctacagtttaagttaatgatacataccttctatagctaagttaaacaatcagattttctgtgaatttctgacataggatattacaaggatctttcttgtagtactattagcactagcaaaaattagacacaaactaaatgcctattaattattaggatagtaaaatgaactagagtatacccacaatacagatgaccatacagtcatttaaaagggttaaagttttctaagataagttgttaagaatacgtaagcaagtcacagaataatatattatgaagatgaagatattcaaaacacaaaacatgtataaagcacgcaatttgaaaagatccacagcaaactacaaatagtgatgccttctgcagaggacagttaaattgggtataatcaaatatattttggttttattttctttatttctgtattttaaaattacgaggcaaatttatttcttgtataatgaaaaataaaaataagaatcagtgaagttacaaacagaaagctgatttgagtagtttggttcagtgacattggaaggtattgattttttttttttaacactgaactctatttctgtctaggattgagtgaaacatcaatagagaaaacgtcagttaattgaccagtgagtcaacagggctaatgagttcaactgatttgaatctgtagcatcttttcttaagcatgtacatataaacaagtcaattacacattttcagatcaatattagatctactatttaatgttcgattgcttcctgtgtttttacgactcaggcacctgaatgttatagaataaagaaatctagagttaaataaacctaagctaatcatctacgtagcttctctttgtctgtggaggacactttattcttttccgtggttcacagcttttactgtacttagaatccattcttttctcttgtatctgggacctgatttctcaatgggaaacgtttccaaatccaaaacaaaaatatctctatgtttttgagtttgggaaagtgctatattatgaatttacttatttttttccttcaattttatttttggaaggagctgtataaacatgccctgctgtcggtaacaagtgcttgaaggccagcaaagtgtttatgaataaggaccgagtctgtgccgcaccagctgcattgtccctctcacactgatagattgtaatctgctttgtggacaggaactctggcctttgttgtattgaaaattctcataaactctgacaaggaaatgtgagcaacagcaatatgcaagctccttcagtgaaaaaccaggtttcctaagatcttgctgaggtctgaacaagcaacgcatttccccatagagaatgagagggattatcaatcatacctcacagtcaccctccaaagtctgctatgaagtgttcctgctgttccctaagcaggcaacagactctccacagggatggtgcattctggtgcttgaggatagggatcagactcagccactggtgatccttgcagatatcatttcttccttggcagatggtgtggaagagtaggaacgtgatgttaaaacaaacacagattcaaatcctagctttacaatttaccacatgtaagactttagacatgtttcgaaacctctctgagttctagttgtcttcagttgagattaataacaattttctcaaagttattgtaagattttttaaaaccatgtttaagaaggacccaaagtgtatagagaaacagtgcttttgttgtctcacttgtaaaggagttacaataaaaattttgctaaattaagaaaaggtagtcagtgtgataatgttttgataggccagtccacccatgaaaagtgggtagggtagacactaattaacatgggcagcacatgtgacattttctttatcacaccacagatctccttattcaatatttgagagctcattaaaatgaaagcaaatggctctccttagtatatcatttgtaactcttgatttattgggttaccattggatttttcccaatgccaccaccaatccacctaaatccattgtagaaatagacagaacttactagccagcttttatctgacttaccccctaagccaggaattgagcatctacgacagaccaaacatgttgttaagaaactgggatccatgcagaaataagatgtgctatttgacactccgtagctcacaattcagtgtagaggtgggacacagaggaacaacacttccgcgtccctgaacaaaaaagcgtaacataggctgggtgcggtggctcatgcctgtaatcccagcactttgggaggctgaaaccggcagatcacttgaggccaagagttcaatactagcctggccaacatgatgaaaccctgtcttctctaccaaaaatacaaaaattagctgggtgtggtggcatgcaatggtggtcctagctactcaggaggctgaggtgggaggattacttgagccctggaggcagaggtttcagtgagccattgtcacgccactgcactccagcctaggtgacaaatggagaccctgtctcaaaaaacaaaaaaaagaaaaaaaaaaagtgtaacatgacaagggctcgagctgtatcatgaacaaagagcttcagggaaaaataaaagctaaaacaccaacttcatcatctgattatcttactcaatgtgatttgaatctagaataaaaacctttagcttgcgctacaagaatcctgaatccacttctcaccttagctcactcatcctgctttccatcttttctcaatccatattcctcttcctttagtctttgcaaacagtgaaacaatgttaaaaacacttagtttataataacaatagcagcaatccaagtaacctatttaacaaaatgaattattatatcaattcaaaaacatagtcacccgtctaaaacaggattatatccccagtgtacatttatcttgattttctatgatttccaactgcatctagctccaaaagttcaattttagcattttattgtttcttgaatattttatgccttctcttaatttaatagtttgcattttacagtatttggaatttttattataagtagcttcaagttaactttttaaaaaatgctatattcttaggcctgtcaggagtatgcttcctctctcctgcctcaactctatccctaccctgaatcctacaatgctagacccaaggcagatgttggaaaatatgtgattgaatttgcttcttttgtgatcagaggttactaggttgctaggttactgaaagaggataaatgagatatcacccgtatttgtctcatttaacagaatatgatagtagggatagtctatgttaatatttttaaatgagcattaataaaatgtatgtttatcacatcatgagtcttttttcatagatctcgaccagcaatgcctcgaactgcaaaaataaaataattttcaaaagaggaagaatgctaaagtcattatttcaggtaacccctatctagcgcacaatgatagacctatgtaggtttcctaaaggtttttgcttaataaccctcttcatctgtctctgccagcttatggagctattctattcactattctcatttctcagagttgtgtgggtgaacagccgactatattgagcatgaatcagctactaaaataagtgctgggtaacttagatatatcatttgaccttcaaattaattttgttcatccctatttcttctctctttccctgcaatatctgtctctttttttcagtatacatttgccaaagaaacacacacaaaaaacactagcaccatcaaatatgtccttaacaaactcatccctcttgaatttctagaaacaaaaatttatgaaaggcatgataacctattcatttttattacagtataaacacaattttcaacacattgtctttgagtgttttcatcagaatgttgcttttatttcaatgaacataaaattggagtaaaacataaaaagtaagttttatctgttctttttataatgtgttaaaatatacacagttgtaattacataaattgcttaaactggccaaagtaggcaatgcatgttttgaagtattattgcatcctttattgttagtcattggtgttgggaacaggtcccccaaaatctggccataaactggccccaaaactgtccataaacaaaatctctacagcattgtgacatgtttgtgatgggcatgacgcccacgctggaaggttgtgggtttaccggaaggagggcaaggaacacctggcccacccagggtggaaaaccgcttaaaggtgttcttaaaccacaaacaatagcatgagtgatctgtgccttaaggacatgctcctgctgcagataactagccaaacccatccctttgtttcccgtaaggaatacttttacttaatctataatctatagaaacaatgcttatcactggcttgctgttaataaatacgtgggtaagtctctgttcgaggctctcagctctgaaggctgtgagacccgatttcccactccacacctctatatttctgtgtgtgtgtctttaattcctctagtgccgctgggttagggtctcccccactgagctggtctcgacaattggaaatccatttgggaaataggctttgtaagtatattcaaagtcttcttttagagatgtccagggatagagacattacatatttatgaattggcattagagtgtacgcatctctatagttgaaaggttctctcctgtgcctctctaagctttctacaactataaattaatagataaagtttggagtcaggagaccaatgtgagtggaggctttgccactgctgcttactagttgggggtgagaatggcagagggagcatacagtaatggatatcccaggatacgacgggagggtcatcagtgcaaagacggagaaggcactagctagtatagtttttctcaatttgcagattcagcctcagttttagtaatacggcaatgagctggaatgagaaagaaaggaagaagaggaggaaggaagagagagaaaaagaaacaatgactactcctggctggtgcagaaatagtatccaggaaagaataccagcttgtgtcctttcacatgataagttattgggtccctttgaagacagctattcttaaacttacagtggtttgccaatccaggacacagacatgtttgtaattgagcttttctctaatctgacggattaaaaggcaaacagattttactaaatagtatttaccaaacagagaagaaaagactttgtagtctacattttcatttatgtgtatgaacaaaagattggttagagtctctgatacagaggtagagaaaatgaatgtttcaaagaaagcaaaatctggaagactatgagactgacttcatcctaaaaacaaaggctggggatgtatttaaaacaaattacagcaaaatctccacgttgataaaaccaggatacccctctggaagttgtaatcatttctttagttactatacaactcccatatttttggccaatgctgctattttgccaaacagttggtcaggggctgtaatccaataagtgttttattttctattgcacattcacaaattaagccacagcggcaacccatatcaacctgatctgctcagagaggcataggaaaagtcaattagtttttccactctctagggccaaatagacaattagaatagagagaaggttgtagggggagaagtctgtgagtattttgcagagaaagtaagtctttgaaaactacaacatcaagttaatatcaatcagcccaacgaatatgtggcactttctaaaaagacgattttcttctattaagttataaaataacagagggtctgatctatgtaatgatcatcatattcactgtatcgtctcacaaaatacatttctataggaagttcttaaatatttgttgaatggatgtctgaatgatagaataaaacgtaaccctccaggagaacatgcatccaggtaagcgtattcattttcccacctgctcccaagaaattatttcccagatcctcctcatttatggttgtcagatcacactgtcctatatttggaataacagagagctatgaaagcagcagatgtctgggttagcaatccaattcccccactcttttgtgaatgctgctaacaaatagtgggtaaattcaaaatcagatgaatcattatcttttttgtcacctgatttgcccacctgctgacagggagagggtcactcttttgatttttttaaaactttttagattaatattattttaattggaaatcataattgtatatatttatagggaaaatgtgatgttttatatatgtacacaatgtggaatgatttaagtcaagctagttaacatgtccatcacctcacttactttttatttattaacttttggggggagacctttaaaatgcactctcctacctactgtaaaatatataatacgtcattattgactataatcaccctgttgtggcactagatcgcaataatatattcctcctgtctaactgaattttgtactcattggccaacaactccctattcccttcctcctcaccccagtctgtagtaaccagctttctattttctacttctgtaagttcaacattttaagcttccatatataagagatcatgaagtatctatctttctatgcctggcttattgcacttagcataatgtcctccaagtttacccatgtagttgcaaatgacaggatgtcctcctttttatggctgaatattccattgtgtatgtataccacatttatttatccattcatctgttgatgggcacatggggtgattccatatcttaattattatgaataatgctgctacgaatataggagtgcagatatctctttagcatatcgatttttattcctttgacttttttacccagaagtgggattgctgggccatatgatagttctatttttaggtttttcatgaatctccatatcatttgccctatgactgtacaaatttacttatgtataaatttaattaaggtggtaaaaaatctgtatgctgagaaaaataaaacagtaatgaaagataatgaagaaaacatacataaatgggaagttatcctatgttcttggattagaataattaatattctttaaatgtccttaacaacccaaagcaatatatagattcaatacaatccctatcaaaatttcaatgccgtttttcacacatatagaaaaaaattcttaaatttgtctgaaaccacaaaagacccccaatagccaaaacaatattgggcaaaaagaacaaagctggaggtatcatattactggatttcaaaatatattataaagctattgtagtcaagaaagtatgatactggcataaaaacagacatattagctgatggaacaggatagacagcccaaatataagcccacaaacctaggccaattgatttttgacaaaggtgccaagaacacacagtgggaaaaggacagtctcttctataaatgattctaggaaaactggatatctacaggcagaagaatgaaatttgacccttatttcacacgatatgcaaaaatcaactaaaaatgtattaaagagttacatataagacccaaaaccataaaagcattagaagaaaactataaaagcattagaagaaaagcttcacaatgtgagtctgggcaatgatttttttggctgtgtccttgaaagcacacaaaagcaaaactagacaaattggacttcatcaaactaaaaagcttctacatagcaaaggaaacaattaacaaacccaagagaaaacctacagaaaggaagagagtatttgtaaaatatacatctgataaggaattaatattcaaaatatatgagattcaaacaactcaataacaataaaacaaacaacatgatttaaaaatggagaaaggaacagacatttctcaaaaaaaaagacatacaaacgcctgatgaagaaatgctcaacatcattaatcattagagaaatacaaatgaaaaccataatgagataccacctcacacttattatcagaacgataaaagataacaagtatggtgaggataaggagagaagggaacttttgcacactgttggtgggagactcactcatacaatcatccctacttaagaacattttgatcttattagaggcagtttaaggttgtctttggagcagaccctaagggaatttattatttgttatatacttatttgccacaaagacaacctgtgcttgacaatgatgggtcgaaataagaatttaattttgtcctttgaaatttttaaatctgtgaatattacaacaaccacaaaaattctatagacttttgttcatggggaaccatcaccctcctgtttcccaaagcagggaatttaactgaaaaaaaaagtacattgagtaatattaagaaaacaaaaaaagcatttaaaattgcaatataatgtagtataaaatgaatatctgaatcatggggaagtatgccatatagaagctattttagatgagtaatcagaaaaaaactttagaggaagtaagcagcttttgtgttaaatctaaaaagatattgctactttttcactataatggttagcatgtgatatggtttcgctgtgtccccacccaaatctcgtcttgaattgtagctcccataattcccacatgttgtgggagggacctggtgggagatcactgaatcttgggggcagtttcccccatactgttctcgtggtgtcacaagagctgatggttttataagggaaaaccccttttgcttggctgtcattctctctttgcctgccaccatccatgtaagatgtggcttgctcctccttgccttccaccttgattgtgaagtctcttcagccatgtggtactgtgagtccattaaacccctttccttaataaattacccagtctcaggtatgtctttattagcagcgtgagaacagactaatacagcatgttaaaccagttcatctttttaaaaaatagaacactggccaggcacggtggctcacacctgtaaccccagcactttgggaggtcaaggcaggtggatcacttgagattaggagttcaagaccagcctggccaatgtggggaaaccctgtctccactaaaagtacaaaagttagccaggtgtggtggcacgtgcctgtaatcccagctactcaggaaggctgaggcaggagaatcacttgaacccaggaggcagaggttgcagtgagccgagatcatgccactacactccagcctgggcaacagagagagactctgtctcaaaaaaaaaaaaaaagaaaaagaaaaaagaaaaaaaaggaatacttactatttctaaggataaggtgagaaagatcatcatatatacagtttatagaaataaaaaattggtataaactttctaagaagtacttttgccatattaggaaacttttggaacatgcatcaatttagttatttcactttaagcaatctaataataaattcttagaaattggaataaaggtttatatactaagatattaatcacattccttttacctgttccgctgtcataatgggcatttttcagttcatcacactcacctcactctgggctgcctcagggccttcgttcttggttttctctctttgaagtattctgaccccaatactttctttcttcaactaagtcctatacatccttcacctctcactcagcttaaatattatttttccagagctgcatttcttctatttccatagaaaaatagaagtttggttctctctgccttcccagaaatacgtttacatagcactctctggtgctcactctcagcacatttacggatacatcaggagagtctctcatctctgtaaactctaagttctatgacagcaggaattgtgtctgtctttcttactgcatatctaagtgtcaaggatggtgcctgttgcagagcaagcaggtacaattagtaggaaacaaggagatgcagggaaggggatacaaaatggcggatatgtgggaagaacaagtctgaagacctaatgcacagtatgaagactacagtaataaaattgtactggatttttggattcatgactaatgaatagatttttgctgctcttgccacaaaaacaacaaagaaatgggaaactatgtgagacgatgaacatgttaacttgctccactatagtaacatttttacaatcttaatgtatcccacaacataatattgtataccttaaagatgcacaataacatttattttaaatacatttgttgaataaatacacagataatatcagtagcaaaaggtgaacaagaagctaaaaatctaaaagggaggccattgtttataaatcacgggaacgatatctggcccaaacctgatggggctgtgtaagtgatgattcttatacttttggattattctatctcatttccactcatcttccatgtttttatgactcactgattaaaaggagatcactattttaatatgttttgcaaatgaatacaaagcatatattgttccttagggagggatattaatgacaaatgagatatacggctctcctcatataacaaggtaggggaaatatacagagattttttaaaaaatggaccaagggaccacaagatggaaaacaaagattgttgggtgtttaaaagtaccttgaaggatatctggctcaatgagctcatcaaatttataacaaaaataataatagtgaatattagcttgacctatgtcacaaggactgtactaagtgctttatctctcatgtatttctcataatcattttgttcctgttactcccagtttacaaataaggaaatttaggtgtaatgccattgcgtcaccatgcttatgaagcaacttaccaccaacgaagaaaagtgacttatcaaaaagtacagagttgggtcatgactatcaaaaactctgctatgctactactcactgcagtttttattttggttggctagtgcgagacagtgcacacacacacactttcatattttccaataaagtcatctaatttttaaaacaatctaacttcagctacccaaaatatacaacagatcaatatggaaaagtattaatacatttatactctttcaaagatcccatattgtcaggctatttgtaactctcacagttgtgacagatagaagttaaataattattcataattaactgacatgttcattcttgtcctctcttgccaaatctgttcaatgtaattagatgattgcttgtgttccattttgctctgatgggctccaattctggctgagtttcatgcattggaatcatatcctgcagttatcattgttattttctccactacatatccccctgtagaagtgcaccatgccaggcatatcattctgtatattttactctgctaatgacatcaaagaatgtatcactatcatttttctggcccaccaaaataacatttactcctgtatcctacatgtgattaatatggaaaggatatgctatgctagaatgcagaactctcaagtaaagaaccctgtgataaatctactgtctttcctgcaaactactggagtgcttttgggtaagttgctttatttctctaattctcaatttacttatctataaaatgaaactaaaaatccacaatgtcttagggaatttttagagatttgcatttatagtgcatgataatttataaaagaaaagttaagattcttttccaaagacaggttttccttcgcagaaattgggcagctgctaccttgcatacattgctaacatggctgagttttaacggaagtatttttcttaccataattcctcttttggtgttaataggggacttctaattaggtcttagtctatttgggaaggttaatagtaaagtactaagcatttatacaaacacaatcaaaggttgcttgcaagtgtagggaaagaaggcaactataaatattcactattttctagttgagtttttccctattgacattagttgtaaaagatagaatttcataataggaacaggcgtggaaggaaaggaactatttcaactcatcagagtcacagagccatctctgaagtcctcaagtttatacatgggaagtgccaaaatttgatcttcagtgtaaaatttcttccatattctcttggatacacagagcaaatagagaaactacagcagatagacttttacaatggcaaaatatgatggaaaagactctgggctcatccttcagagaagccttctgtggcagagtaactgtctgtggaaggaaaaagtaaatcatttttaaaaaccccactgctccaaaatctgctctaatgccactgtcttcagggccaagtattccatctggcaagagcaagtcatggaaaagcacaaaggtaatttacccaattggcctgggcagaacattgtttcttcagttattttttgtgactctcccttcagagtgtgattcagacagttctgcaccaagatcagtggctgtgcagagttcaaataggtgaaaatacagctctggatgagtagcactgtattttttctcagttcagtctctcgttcttcattgctcagctcagagtttctctctctgtcttcattgctcaacttcgtgtccctgcttcccaacaggagaaccctatctaaaatatttatttttaaaaaatcttgatatcatcccatcatagaacaagatatacagtacggtgctcaagctcgtgatgataaaatatcagggatctttgaaaatttataatctaagagcctcaacttctgaatgagctgctatgataaatgcaatttattggagacttcctcatctttattattttctatgattccaggcaagagtcatttcaaaatgagtctactttagcttcagtacccttggaaaccaaccaatccaatggttttactgccttggtgagatgctgtatttcttgggaattgccatttagtagattaaaattataaaacccagcagagggaaatttcccaacagcaaatcaatttatatgtctttcagagagttttccagaaatgtacttaagaactgctgactcaatgtaatgttcttccaaagccaggacactcagggccgataaggacactaacccgtgtattttctgagcttttcctagctggatatttgtactatgtgaaattcatgttctgtactctagagacatgaatcacttgttcaattaaaaatagtatttctctggcaattgtttgatcaagaatgggaataagttgtgggtgaaattgtgaccatctgcattcctgtcttggaaacctgcctgttgttttgtaaccatatgcagactcattgatcagtttttctctctgaaacatcaataccaaaattaatgactatagcttcttctaggattttcttaaaattagttcagggctttccaatgtgggagttaaatgcatgcttattcttgtagaatttagaaaatataatcacattccaagagaaaagcatattgagggcctagtcatatgtaattcttcaccaaattctgggtcttcttttgttggctcaaaacaaataaatataattgccccaaagaattacagtgtagagatgacctaatcaatgacagtctcttaattttaatatacaacttgaagaatccttttatctgaattatcagatatgcccatcccatcaattaatgcattaattttccaaatctttattacatacctccaatgtggcagttattctacagcagctgaggatatgtcattgtgatataaatctctacaactttcattgtcttagaaaaaggcatataaactaatatttaaattacaaaacatagccgagcacggtggctcatgcttgtaatcccagcactttgggaggccgaggcaggcggatcacagggtcaggagatcaagaccatcctgtgaatggtgaaaccctgtctctactaaaaaaaaaaaaaaaaaaattaaccgggcgtgaaaaaattagctgggtgtggtggcaggcgcctgtagtcccatctactccggaggctgaggcaggagaatggcgtgaacctgggaggcggagcttgcagtgagctgagattgtgccactgccctccagcctgggcgacagagcgagactccgtctcaaaaaaaaaaaaaaaaaaaaaaaattacaaaacttatatacatggccagagaaagacaaagaatagaacatgtcattttttttaatatagatttggtttttgacattagatttgaagcctgacaaagtaagacagagggaatgagggtaattctaggcagactaacgaatgcaaagggaattggcttgtaaaagatcagaatatttggggaaatatgtaaatagttcaacacaactgagcatgggtataagtggctggagcagaggttaaaaaggcttttaatgacaggcaaaagcatttggacttacgtgttaggttatagatatttacagaagaattctaagcagggaaatgctaggattcagtgtgcattttagaagaaagggctgttaacaatgagattctagagaagagaacaataaatcaggagaaaccccaaggaatgaggattggagccagaattaaagtttgggcagatgagattgagagaagaaaactgcttcctaacttcttgtgaatcactggattgtgaggtgagatagaaaacggtccaaaatgtttctaagtatagcaatggtatgggatgtgtgtaaatgctgatgtcagtaacagatgatggaaactagaagagtcttcttacatctgctttttgtttgctctttgtgttttggcttatttcaactacttacttatttacttaatgtttacttatttatttagatggaggcattatagtatcttcctaggagggagggcaaatgaccacattttactgtatagttgtggagggaaggggtggtgcttcattaatatcttggataactgtggtgttccctggatttctgtttgggaagtttgacttatcctgtatctgttcagtgactattttaaaattagaatgttacactttttatttgttctcttaaatgtcactgctccaatccggtaagtggaattttgatcttttatatcttatgttggctatagcttccaattttgtgtcatgcaacattgtgggacaatatttgtgtgaatataattgtattcaaatcacacatatgttttattgaacaatgtcaggaaccgtgtactgtagcctatagctaattacttctttctaatgtgacgtcaagaaacgaatcactcttcttccaatggagctactcaagagccttaaatctactgcaaagtgctgtaatttagaccaaggttataaagggaggctatattgagtgtgttttgctcaaatcaatttcttgtaatttcacatgccttatgtatcaaaatccagggttgacagatataaatgtacttcacatacctattgattgattatagtcaatcaacaatctcaattgattgattgatattcttacattaaattcaaaatgatacttcaacttttaatatttatctcagtattgtcaattttaacatcaggggaaatcagacgtattgtgttattttaaaagtaattagaaatgaagagatatttgtactataaatttattccacctgtaatttagtaatatattttattacttaactaaaattggttgtcatcatcattacattatcaactgcgtgcttactacatgtcagtcattaatcatctaaatcagtgattcaagtgaattctcagaacaatgatatgattcgggtactacaagtattcctatcacttacagtgatcaagaaattcatgcttagaaatgcaaaccaaaaccgcaatgagatatcatctcaccccagtcagaatggtgattattaaaaagtcaggaaatgacagatgctgacaagattgcagagaaattggaatgcttttacactgttggtgggaatgtaaattagttcaattgttgtggaagacagggtgccattcctcaaagatttagaaccggaaataccttttgacgaaccggaaataccttttgacctagcaatcccattactgggtatatacccaaaggaatataaatcattttagtataaagttacatgcacacatatgttcattgcagcagtattcacaatagcacagacatggaatcaacctaaatgtccatcaatgatagactggataaagaaaatgtggtacatatacaccatggaatactatgcatccagaaaaaaggaatgagatgatgtcctttgcagggacatggatgaagctgaaagccattatcctcagcaaactaacacagaaacagaaaaccaaacaccacatgttctcacctgtaagtgagagctgaatgagaatacatggacacagagaggggaacaacacacactggggcctgtctggagaggatggagggaaggagagcattagggaagagagctaatgaatgctgggcttaatacctagatgatgggttgataggtacagcaaaccaccatggtacaagtttacctatgtaacaaacctgtacttcctgcacttgtactctggaacttaaaaaaaaaagaaaagaagaaagaaaagaaaaagaaactcatgcttaggaaagattaaggtaatttcttaaggttttttaggaataattacctctattaatagtcaatagcaataacgaataaataaatttatttttcagagcttctgatcataagaaacttgaaatcctctcaatattcaaagtattataaacacaagataaatttatgtatgagcagatagagagctaaagttttcctactgtgtattttaaaaaacagtgaatgaacaatggggacaatgaaggccagagataggaaatctccaactgaaagaagaaaatactcggttttctgtaggcattttttttctgacagcaaatgtttggcaaatgggcttttaattatattgacaatacctgaagtagcttgctaaatcataccctcttttgcgagcttgttctttaatttatctaaatttagattcaatatccatcccagcagggatctggaactcgaatatttcaccaattactgcccctagtcctaaatacattgcaggtgtttacttctacaggctgagacatcagtggttttctcagcttatacccttttcctctagttgaggagaggggattattgtacatggttaggcaacttgtggctacttattggtcaaatgtttagatattgtcttcaatattttacttgaagctatattttataccaaaaagcccacagatacattatgcttaaatgcaaaaaaaaagttcccgatccaaaaattatagaaatcttttacctatgccatttcaataactcattccctttcatctcttcattagggtaaataaggactttattggtgttctttactttcagccagtgtctatgaaatgacaacatgtataaaaaagacaccaagtcaatacctactccctgagggcacgtttacttcagtttaagaaaaacacactacagggtattttagtatttccagtttctcttgtaaatggagaacttaaaagaaacattatctaccactgtgagccaaagaggaaataatgttgagaaattgcaaacttttgagggattaagcaatgacctctacagaaaaaaaaaattcacaggggaaagaatccttgggaattgaaatatattagacaatgcatcaaaggggataaaggaaaaagaaagccaggtagtttacaatgagatttagagaagtaaagtcctgaatgtcctacttctcatgactgggaaacaatgaggtaacaatggggctctgcactcaaggtacttaatgagaacaaacatagaactatattaatagtccatagcaatcacaaataaataaatatatacatatataaaaccactcagtcccatggctctatttccatctgctcacattgctcccacctgctatagtttatcagagccactcaagtgtcatatgaaggacacccttgttgctttggcttgggctgtgccatgtggcattttggagaagtttcagctggttctctgcttcctcatgtaactttggagctgcttttatatgacctaagatacacttttttccaataaagttttctccatagatttacacctttatgcttttcttttgaaagtaggatccactttagtagttctttatttcggggttttgcacgtaccccaaatgtactttggtaaaaatagcctggcacgttggggaagggagactgcaataactaaagaatgtcatatactgttatcttcgttaaaataggtttgatgtctcaaaggttcactgaaatggggagaatttaatcatctcattcaaaaggaggatagagttggttcatgagagaaagcagggcataaatcaaagtttcctaccaggagtcaggagatctggctcccatttgcagctttgcctcaaattaagtgacttggcttaaattattttacctctcctagactcaagcttcccatctataaaagagtgtatgatccagcaatcctgctgttaagaatatatccaaaagaaaggaaatcagcatattgaagagatgttgacacacgtactcatgtttatagtggccctattcacaagagccaaaatatggaaccaaactacctgtccatcaattgatgaatgaataaagaaaatgtggcctatacacaaaatggaatactattcagccatgaaaaagcaggaaatcctgtgacaggaaacaacatggatgaaaccagagataattatgttaaatgaaataacccaggcacagaaagacaaatattgcttgttctcactcatatgtgagagccaaaaaggcagatttaaaagaggcagagagtaaaatagtggttaccaaagcttgggaagggaggagagaggggaacgaagttagttaatgggtacaaatgtacaggttgagagaaggaatatgctctagtatttgagagtatagttgggaaattatatttaacaatgatttactatatatttcaaaatagctagaaaagcagaattataatattcccaacacaaagaaatgacaaatatttgaggtggtggatatcctaattaccctgatttgatcatattgtatacacatctcaaaatatcacaagtacccccaaatatgtacattatatatcaataaattatttaaaaatatatatatatcaagacttttcaaccttatctatcaggctcacatatagttgtagatataggttttatatatatatacacacacatgtgtgtgtatatatacacacacatgtgtgtatatatatacatatacacagatagatatagatacagatgcatcaatgctcagcttctcgctcaagagctcggatttaattgaaaagaggatgggattcagacattacataaatcattatatgttaaatctacccaagtgattctaaggagtaactagggttgaagaccactgaagttaataacgtctatgttacttctacttcccaagtatagaaagccaaatccataataattgcagggagtttttatgtgcatggcagtgaggcagacagaaggagggagtaaaaggaggggaaaggagaaaagtaaatcactatttctcatcctcagattcttacaatctggacaggaaacacccacaatattaccaccaaaatagcataggctgtggctaatgcaaaatagttcatagcgaaattcttgaaaaaaggtgaaataagccattcataagactttataaaagaaggtagggatcagcatgaattagaattagaagatgaaaaagatttgctgatgaacctaggagcacaggcagcatgtggtctttctcagttatgagagaaggccactagaagttctgaactccatcttgccacgatacatcatgggctgtcaggcatgaggactttgcacatgttaacattttattcctccggtcaaatcccttctttatcatttactacaatccatcctgtaagtgcagtggcatgatctcggcttactgcaacctccacctcctgggtttaagtgattctcctgcctcagcctcccaagtagctgggattacaggagcctgccaccacgcccggctaatttttgtatttttagtagagatggggtttcaccatattggccaggctggcctcaaactcctgaccttgtgatctgcctgcctcggcctcccaaagtgctgggattacaggcatgagccaccgtgcccagcccatcctgtaactcttaagggccacattagatatcatctcctcttggtatcttttactacctttaataaagaggcaattagccctcacttatcttgccaaattaaagttgcttttatactgcctactatattacattatatacattacttgttttcacgtttgtttcctactctagatttttttttaagtcatctagaggtggcagaacaataaaaataaatcttttttaactcaggaataattaaggagtaaatatctacacaaatgaggctggaatatgaaatgtttgtgtactgagtagtgccataattggagacacaaaaaaataaggaaaataatgtgaaagtattgcaattgaagttctctgagcaagaaaatggccaagttagaagcttgataagaaagggaataggccaggcgtggtggctcatgtctgtaatccagcactttgggaggccaaggcgggtggatcacgaggtcaggagttcaagaacagcctggtcaagatggtgaaaccttgtctctactaaaaaaacaaaattagctgggcatggtggtgggcacctgtaatcccagctactcagcaggctgaggcagagaattgcttgaacccaggagctggaggttgcagtgagtggagatcgcaccactgcactccagcctgggcgacagagtgagactccgtctcaaaaaaaaaaagaaggagaataaaatgaaggtgagaaatgttcaagaagtctcgatcaccattgacaactgactcattcaggaatagatggtgattcccctccaatttttgaagctgaggaaattgtatcatattagccgagagagtgtaagagtgacagcaatatagagagagaaattaagaatgtgtgggtgtatgtaaataaaaatgataagcatatttggagcatttaaagagaggacaggttatccatatgaagactttatcatagacactcgaaggacaaaactatggagtgaattttgctaaacgagttgaggctgcatttgggaatttgagaatggttcacgaaggtgacgactaaagatatagaaaccaaattgaaagaacttgcaaaatagagagctaagcacgtaaccttggggggaaaaaaaccagaaaaacatgatattagaagctgaaatgagagtttcaaaaaggaagaggtgacaaattctgtcaactttctcagaaaagggaaaattcattttgagagaatgtagtcattgggtttggcaaaaaagcttcagaaatcccctgaaagggaagcagtttctgtagagacgggagggaggacgctcccaggaggagggctgttgtgaaagtcagctgtgtaaaggagtacagaagagagttgggatgaatggcttaactggaagtaaattattattattattattattattattattattattattattatttgagatggagtctcgctgtatcgcccaggctgcagtgcagtggcgcgatctccgctcagtgcaagctccgcctcccgggttcatgccactctcctgcctcagcctcccgagtagctgggactacaggagcccgccacgacgcccggctaattttttatatttttagtagtgacggggtttcaccgtgttagccaggatggtctcgatctcctgacctcgtgatccgcccgcctcagcctcccaaagtgctgggattacaggtgtgacccactgtgcccggcctgtgaattatttttctaaaagaaatggacaccaaatttatctgaaaacaaaataatcattctgttccattaacatgtatgtctattacagtgttactaccaccaagtcctaattatgcaactttatactaagccttgaaataggcattgggtttcctccaactttttttaaaatgtttttttcaaaatggttttgcttattctaggtcgtttgtatttccacatgatttttttgaatcagcttgtcaattgtcacaagaagcctggaagggcttttcaaagtattaggttcaatctgtagattgaaatggggagaaatggcatcttaatcatacagagacttctttctgatcaatgaatatgtgattattttttcatatatgtacctttttaacaattagctcttcgcaccgatgttttgtagttttggcatttaaatcttgcacatctcttgtcaaacttatttttaattatttcctgagtttgaggctattgtaattgttgatgctgttctgggttccattttaagtgtttatggtgatatatagaaatgtagcatattatctttcatccttaaacattgttaacctcacttcttagtcctggtagctctcttgtaaattctttgttgttttcctatgtaaatgataatgtgttctgtgaacaaagtggtttacttcttcttttccaatctattgcctttacttatcctctttgttttattgcagtgacagaacctccagtacaatgttaaataaaaatgggcagagtaaacatccctggctttttccccattgtaggaggattgtattcagtcattcacattaagtatgaggttccttgtaggtttttcatagatgtccttaattaagttcaggaatttcagtctgtttctagtctgctgaaagttttttaataagtagacattgaattttgttaagtattattttgcacgtatcgatgtagtttttctttttactttgcttacactgtctagtgcactgattcctctcattaatattaaaccaactttgcattcctgagatcaatgccagtatgttctgttatctttttatatttattggtggattcaatttgctaaaattatatatgaaaatatttctatcttcagggaaaacattggcttatgttttgttttcataatgtcattgattggttttcttaacaggggaatgctggcctcataaaataagttggagagtgtttcttcctgtttttttttttgtgtgtgtgtgtgtctatatgattggtctgattactattgcatttccttaaatgttttgctaaaatttaccagtgtaaccatctgggcctagagctttctgtgtgggaaaattttaaattttaaatttaatttatttaatggggacaatttcttcttgagtgagatttgatagtagcataattcaaatgcttcattcatttcatatgttatcagatttcttgacacaaacattttttgtaatgtcaccttatcgacattttaaaataagatctgtagcaatatgcagtctttcagcactcatatttgtaaattattatacttcttgatcagtatggatagaggtgtatcatttgatttttttcaaacagcttttggttttattgttttttattccttgtgtgttttctctttctttgatttttttttctattaatgttagtattcttttttctgcttactttgtgtttaatttgctcttcttttttcagtttctaagaggtaagcctagatcattgacttgaatctttatgttttagtagaagcatttattgctgtaaatacccttctaagtatcactttgattgcatcccacaaatgttgatattttgttcaattttcattcaactaactgtttcctaaattttcttgtgatttcttctttgacccatgtatcattacagtttggtagtttaatatacaaaatgttagtattttccaaatatctttctcatttatttctagcttgattcccatgtagttcagagaacatattttgtatagtcttaattcttgtacattttaaagctttgttttgaggcacagaatatgttttgccttggtaaatagtatgctcttaataataatgtccattgtactattgctgggtgcagtgcttttctataaacctcaattaggtcaagatggttgatagcgtggtttagatcttctctttccttattaatttattatattcttgctctatcaatttctgagagaggtgtggtgaagtctccaactatagttgtggatttgtctctttctccttttttagttttacctgtgtttgctttatatattttgaagttctgggattaagtacccacatatttaggaatattatctcttactcattttttcacccatttatcattatgcatggttccttcttcatgattatttttaataaactttattttttaaatcagctttaggttcacagcgaaattgaacagaaagtacagacagttcccatgtaccctttgttcccacacatacaacagtctctcctactgtcaatgtctcacaccacaatggtacatttgatatgtactgaaccttttaaattttgtaacagtttgaagtctgcttttctgatctcatagagctactttagctttcctttgcttagaacttgcatgatcttttttcatctgtttacttttaaacaatttatgtgactgtcttattgacagcataataagtctttgtttttcccatctgacaatctctgttttctaattggagtgtatatatattgagtatttaatgtaattgttgatataatatttgaatctactatcttgctactgatttgttgtcttatgtctttttgttccattttttccatattattttgcattaagaatttttataattttcttaattttcattattggcttatttatttcttctttttatgtattttccagttgctgtattatttaaaatatagatctttaacttgttatttattttctaatatcatcccatttatcataaaacaaaaaaccttaaaagattttcattttctccctcccatccctcatgctattggcatcataactactaaaaatgggataagctccacaacatattgtagtttttatttagaaatccaatttttctttaaggagtacataaatagtaaacaaacaataccatgcttttggttttaaaaaatcctcttttaaaaaattatttctgatattcttccttttgaataggtcaaaattttcatctgattctataatcttctgctagtgtaacattcattgacctttttataatacaggaatctaccaatataatcttacagtctttgtgtatctgaaaaaattaaaaggtttacagaccctccagttttggaagatattttcactgtgattaactattatggattgaaatttccccccaattttaaagatgttgttccatctttaaactggcttatacagtttctgaaagaaatctgttactattcttatctttgcttttctatatgtaatgattctttagtcttgttttgtcataagattccctctttatacttagttttgcgcgctctggctatgaagtgtctgcatctttttttaaaaaccgcttggagttctctgaaatttatcaatctgtggtttaatttttttcccttaaaattaggaaattcattgtctttctctctccaaatatcttttcttttattgggactgatattgtgtatatgttgaactccttaatctttcctatagctctctatttttttctgtttggataatatatgtgaccaatcttcaagttctttgactccttgatcatcatcacatctgctgataaactcatggaacacgtctttatttctgatgttaggctgtttattttccccttagcatttccattttattttatttgtaatactttcccatctgttcatacatgttgttcacgtttcccattagatatgttaacatacatcagcctaataatatctaaatctcattttgttgactgctttatctccgtactgtttttttttttttttctttcttcctgtcttttacctttgattaggactgtgggcagcagggatttctatccttggtagcatatgtccttctatagcagatggctcttgttttgctcctctttcagaggtggtgggtttttctctgagccttggggacaggaagattgcctaccctaccacaatgacaagacattcactttgtaggagaggtttcaaggaagtgggatttcaagggtgaggtttcatgctgagtgccactgaggagggctctcctctcttaggtctcctgccctgcccctaatctttcccaagagcacagtagaagagtctcatgaaaaggaaatcgggagtgtggactccctgcaagcctggggctcctagctattctaactatcgtgttggctttttgagctcactaaagatctggctgttttcttcttacctgctattatgggggctccttctccctctcatactgtgctcaactgctcttttgttccatctctcctcagaggggctgttagctgctacactttggaattcaattcacctggttgctgtgcaacttctggtctctaataaactcaaaaaaaggttatgatttataaattatctggcctttgtttttctccttcttagggtggaagcaacattttcttacagatttggccatcctaagtggaggaggagtatcaggttttggtatccattttacagcttgaatattataagttctgtcaaactagttagagttctcatttatgtcttttttttaaatttcaagtttaaactttctatcacattgtgaggaaaaaaagtattttttatggttacgttttaaattattacattataatctttgatgcagctagatttctttttcctaatgataaattaatggcttcaacatcatttactaaagtatatcagtttactcaataattcagatcatagaatttagcatatattaaattcctacatgtatttcttcctgtatttatatttctaggccataagacttttggcagacgctactttttttttgagtcttgatcaaccatgtaaataattttggctaccctgctagagagaccagatggagagtgtgacattctgaagggtgaaagtccacaaggggtggaagaccacagaaaatgaaataccacgagaagtgattggcttcaatattccagctaccccagcacaggaacaagatcatgagagaagccattttggatcctccagcctagattgcatgcacctgaccaagcccagctgccggcacatggagaagagataggcattcccactgagtcctggcaaaccagcccacagagtcataagcacattaagtggttatcgttttaagtcactaagttagggtgattgttatacagcaacagataattaatatgatttgaattttctcagtaaagaaccaaagatttattgaaagtgagagaagatgaatcatttctgggaagtggaagagaattggaagtattcgttaatagtcatagggaatttgctagaagaacacaatacaaattaaggtaaccattcagcactagggcagtggcatacaagatggacaataataatttgtaaaagataggtgtaatgagactattatttttataaattcaaattcaaatttggtgcatgacctgcattctaaaagcaaaagttttatattgaaataactgttaataacaaaaaaatttagagcatcttgaaacaaaatgcatttgcccttggtgtcaattggcagaaagtggcattgatgcttttatgttctatgtgttattttgtcagggagtctgggtgttaaatgctactgtagaacatttaccaagagttaggaaataaataatttctctacaaagcagtgaaacaatctgcacatatctttgtacattaaaaagttcagatactttgccagccactgcattataagaacgcttaccacatattccttacttaacgaagactgaaacatagctggggaaaccaaaaaaaaaaaaaaaagtaaagttttgaattatagtttaaggccattgtgaaaaggatatgtaaggatatgtactattgattatattcattactaaataaatttaggaaatacatattattaggttttgaggcaagagggatcatcttagggtgggagtgaagttgttctggaaggctttgtagaaaggttagaattcagctttttgaaaagagtcagtttaggaggaacaagggttgaggtaaagctaggaactggatggtgaatgaaaccaaaacacacacccccccacactctcccccaacacacacaactggaattccaatgttttctgttatatgagtgattaaagtaatttgacctttgactggagggcaagtttgagatgctgagtgtttacatataaggcagtagggatacctgctatttaaactgtatcatgaggagtttggaaatcaggtttataggcaaccaggagacactgagcaggaaatttttagaacaaacaaacaaaaggacccaaaatgtgaaaagttagcctatatactatgactcagccatcccaagattagcaaagaaatcagagtttaatatcaggtattagggacaaaccctgtctctaaaattctctggattgcagccatgtaatgtactggcccagggatggagggaagggaaagggagggagcttcctcttcgccaagaatatttcccttgattttgccatgtcgactaaactgaatctgaaacataacaaaggccttttctttgaaattttctttacattgaaaatcttttctacagggaaatcaccatggaacaagaaaatctggcttccttgtctgagtcgcaggatcattatatccaaatggaaactttcggtttccccttcaccaggttccagcatctcacatctttcttactttggggtccaaggaatgggtctcagtgatcctgcaaatacctgaaattatttgcaaaataggtatgcttataattacatgcatttttttctaggtagagcccccatagttgagacttatgaccccaaaaagaaccactgttctgtgtgctgaatcccatatttaatatgtgatatccagggcacaatcttagatgcctaggtgctccttagcccagctgagagagacgctgaagcttcctctcacctcccacagaggtaccctccccatttaagactgacagatacttggcttgttctttaggtaactgatttcagaaatgggcacttttcatagagaccctactccctgcccacagatgtcaggccttctcctcacaacaattaagttagatcagttcacttccatacaacctgatctttctaaaccaagcatccatttgcttatttagaacatgaatggggtcagtgagaagcacccaaatccactcagcaggactgaagggtagacagtcagaggtgatggtttatgagggtaggtttaggaacttcaacctctcttcctccctaatatttttactgttgaaatgagactgcagcccttactaggcaaacccaggcagcagccatcagtactggacctctggcagcagagccgtgctttggctctgaatcaccttcttcacccccagcccagtccagaatgctttggaggccgagtgccacaaatgcctgagctccatgtatcagcctcattgcaaagcaaccgtagggatgggaagggaagaatgatgatccatgggcagtgttccagggtacccctggagactagtgatgcagacagaagggggtggttgtgctgtttcccatcactcaagagttatttcacattcacaagactgtgatcagatcctgttcatttattctacttaaaatgacacaacaggaacagagacttggaatggaaacttttctacctgggtctttttaggatttcagcaaagatataaacatcctctatttttttttttttcttacaggagaataaaaactcttcaacatacattgaggctttgcagccttttcagttgaggagcataacaagagattttctgctctagagtccaaatcttttaaactcagaggctgccactctgaggtcattttcttttcatgttactggaagcatgatgtatactttaaaagtaataaagttcaaatagagcccactggggactgggaaatgggctttcagagtaggttgattcattccatttcagtcatgtaaagtttaaagagaaagcaagacaggggagttagatagaaggtgaacagagaaggtatggttgatttaagaaaaatgaccttcaagagtcattcccattgcctatgacttcctaagaacctatgaggttggatggaaaaaacaatgattttaacaggagtgttttcgaccgaggacacagctatactaaactctctcaataatcacaattgtcacattttaatattcccttttttatatgaaagtaggacagctttgtccaagattgaggcattttcaccttgtgcttttctgaacaaattatgtgaaaattaaaaaaaaaatacagagcctggccctccagaattctctaaaacaaaagctcaaagcagcctgagattatagcctacacaatttcaggttagtttttcagtcatttttcagctatgtactatgacatttataaatataacttttctggaaaggaaaaataataaaatacagcaagaacaatttcttttgtacttagatagccaagtgcctggatgtgaacagccacaagtcagctaaacctccacgctcagtgaggaagctgtggatcagagggttttgtgtcatgcgctaataagctgcacagctaggctcacccccaaggtttctggcctatgtctattccctttacttgacattttgctatcagaggacactgcaaggagacagtcagagtatcattttgagactttgggttagtacctaaaacagcaagagaggaggaggaaaaatttgaattaactctattggccaaaggaagaggttataagctctttctgttctgagctctatttaacatgaatataaccattttctcagcttttttcctttctggagagaaaagtactgacattcagagacatggagaaaacagaatattgaatcttagcaatctctctgctacactattggttcttctgcagaacctatcatcttctgtgaacctacaactttctctcctttccttagagtttctccatcctgacagtaattttaccatgcaggatacagaatatgtgcaataaatatatgctagaagtcttgagtcctactgactgctttattctacattcatatagcatatattttattattatatatggactatgcaatatgtgtctcatcttgtgctgtgagctttgctttttagatatgatttcctttaatcttcatatgtactcagtgaagcatatactactattgttgtccccattttaaaccagataaaaataagaccaacagataaaggccatcagattttatttttttttttgagacagagtctcgctctgtcacccaggctggagtgcagtggcacgatctcggctcactgcaagctctgccttctgggttcacgccattctgctgcttcagcctcccgagtagctgggactacaagcgcccgccaccacacccggctaattttttgtatttttagtagagatggggtttcaccgtgttagccagaatggtcttgatctcctgacctcgtgatccacccgcctcggcctcccaaagtgctgggattacagatgtaagccaccatgcctggccagaccatcagattttaaagcttaactcttaattactgtactacactgagtgtaactaatacatacatttggtggaatttgtcttaggtacaatacttttgtttttatttggtatcatcacattatataaaagcaaaagtgacccccaaaatagcttccactttaggctctttttctctccacagcagacaatacccctactaaacagaatttgattgttgcacctatgttaagtcggggaccagaaatttattttagagtgttcgaagggcaaaggaaagtactgctttttgtagaaggattaacttcgtggctcaaatttgctagatatttgtctaaacttctcttcagagaaaagcccgagcttgcttgctgtaggctcaaccaagttttacattttgagaccataagcctgagatcagaaatcttttaatcagcataaatccttaaaagatcccataactctgaagtcatgtttgcattataaacagaacatgtgtttcatggggtgtgaaaatgccagcagaaactgcttgcttaattttatcaacctacttttttagagagtgctgacagccctacagaagcatgactagcggctgctgaggttggcaagcccacattctgtggctttttctttaagtggcgtatcaggagattaattcagcctgaatttcacatttgtgttcggtagcaattcccagaggccttaggagcaaatgcatatttgacacctatttatctttgtcggggttgtcatgggagccaaggtgatatcaactttagtgaggtcctttgaggagaggttatggggaactggatatatttgcttggttctattttcatatctatctactgtttgccaaaaggttaagtttctcccacctctctgtcagcactacatttggtaatatgaaagagatggaagcatggctggttgtagtgataacgaccgatatggcagagacgtgcgcttcgaggtccacttgttcctgttgaaagcattttttcttgcctttaaagagattttcatattgatgcgctgtggctgataatgagaaacctgggtatttaaaaaatatatattttttgtcctctattattaatcatcaaatgcgagagagcagatgaagcaaggttaaagaagtacaatgggattctaaagaaaaagaagtcataatggcctggagcagtaaattagtgcaaaagctagaaccataggaaagcaatagtttgttgacctaccacttagagtctaagcctttgaggtttgaaaactctaacatgatttcattcattacttcaatacactgctggaaaaaaataagaaatgtatttgaatcaagttttaaatctcaaattccgaatttgttatttcaatagtttggggggtataggtggttgctggttacctggatgagttctctagtggtgaattctgagatttttagtgtactccttacccaagcagtgtacactgtacccaatatgttgtcttttattcttcaccccgctccatgagaccttagagtcagtccattatatcactctggatgtttttgcatcctcataacttagcccccacttatgagtgagaacataatggtattctgaattatttcacttagaataatggcctccagttgcatctaagttgtggaaaagacactatttcattcctttttatggctgagtagtattccatggtgtatatataccacattttctttatctattcattggtcaatgggcacacaggttggttccacatccttgcgattgtgacagattccaaatgtgtaaatgagctttctaattgaaaaatgaattgagattgaaaaatgaataaataatctcattttctgaaagcaaatgggcaatgtaattataaagatttttttcaaagcactcttgagtttaaggacacatgcacacaccggaacactcactgacccatcttctgaacactcactggcccacctttgctgtctttcttttctcttccctatcaatttttattgacctgttctaaaatttgcttgcctgatttgtctcagtaatcctctcaggtatcactgtttgaattcacattttacacatcaaggcacagagtagtgacacagctcattgctggagtctggtttttgagcccatgattttaactaccatacaatctatttgcccagtacagaggctaaataatagcaataatgcatactccatcagctccatttattgtcattcatagccacataaattttttttaattatactttaagttctatggtacatgtgcacaacgtgaaggtttgttacaaaggtatacatgtgccatgttggtttgctgcactcatcagctcgtcatttacattaggtgtttctcctaatgctatccctcccccagcccccgaccccccaacaggtcctgctgtgtgatgttccccaccctgtgtccaagtgttctcattgttcatttcccacctatgagtgagaacttgcagtgtttggttttctgtccttgtgagtttgctgagaatgttggtttccagcttcatccatgtccctgcaaaggacataaactcatccatttttatggctgcatagtattccatggtgtatatgtgccacattgtcttaatccagtctattattgatggacatttgggttggttccaagtctttgctattgtgaacagtgccacaataagcatacgtgtgcacatgtctttatagtagcatgatttataatcctttgggtatatacccagcaatgggattgctgggtcaaatggtatttctagttaatgctatccttctaattagctgtggaaaagtaggttttatccaccatctcttgctgacttttatagtaataaataccctacgtgtatggttaggttttagataggtagatttataggcatagtatagatatacagctttctgaaaggatacaaaagaaactataatagcctctagaggaaaaataaagtagcaatggatgaggatgagaggattaaccttttgacatttcttatacttacttatattacctaatcgaacacaattataaatcaaatccaatcaaacaaaaacaacagaaatttattctcctggaagaacgctggctttcaagtgaatgagtaatgacttgtgatcatttttatgcatcatcaataaaacattatgagccgcattctttctacttcactcaaattaattttaccattaaaaattaattcaatttcaatgatcagtttattttaattctctaaaaatgtgtcatcgttttttgctttcaaataaacatagatgtactttgtttagatgcactgacatttaggattctacaaactaatttgtgcttaattacatctcgctcaaaagttcaaacttttaactcataaagtttaactttatattctggatttcagcaaagcactgcctaacacattgcgtgcagtaggacaggaagtgatgactgtttctttcggagcttctgccagtatggaaatgccacatctcagttctcagcatccgtactcattcattcttttattcatttattcatttattctttcacttgcgcacaatgttaattaggtccttttcagatgttcagtttacctccggtcatgacaatctatggagaatgatgggagcaaagagagatatttcaacggaataaaacaaaagcaattctattaacctattcaacgctggggtcccagctgcacttcactacagataaaactgtggggatagtagtctctatagttgcataaacgccaggtgtttttttagactcagatgcaaatttgcttaggtttatatttgatccttgaatcatttttgtaaccagctggagtttttggccataacgtattaacaatttttggatgaatcatgctgtggtcattataagcctctctctggtctgaatgactggatctatttttcagtttcatttttaaaacagttgattatacatatgtcagcatgcataatctttattgtatctagagatgcctaataaaacacacgtgaataaaatattctccaggcaagaaaaatgaaatgcaaatctgatgttcatagatggccttgcataaaacagctgggactctgggctctagatttgaacactggatttgtccctggtagttctgtgtcctaatgtgagttaactgaatctctctaagcctcaatgaattcatttaaaaacaggatttgaggatttagtatataacatgaatacagttcctagtatagtgcatagtattcagtcatcactcaataaatgtgaattctttttgttggttgttgtccttgatgttgctgaagaggcgtgtgagaaggcagcaagatgcaatgatgtcagtgcatgttaggcagcaagcagataaactcatatagcttctctataggggtgagctgaaataagaatttcctccgatagctcaaatttctcatgttgtaggcaaagccctccagaacacatttctaatccagagttcattccaactccttccccacacaagccttctgctttagtcagaggcctctcctcagattcttctctgtgaactttgcttggaaggaatgactatttcctcctaaaccctgttcatattccggagtccttcaaagctagttcaaatttcacttcagtagaactctttcctaaaaattgtatccttcccatccctttcttaaatgtcaatagaataattatttttgccacacattttggtggtatattaggattctaggcagtcataacaaattaccaaaaacgtagtggcttaaaacaacgtaaaatgtaagaccttgcatttctgtggctcaagagtctgacacaacttcactcagttaagaccgaggagttacagggctggtttcctttctataggcgataggggtggagcctctttcttcctcattcagatgttggcagaattcatttttatgcagttataggactgaaggccccatttccttaccagctgttggcttgaggccaatcttttctcccagggggatctcttgggtctttgcacgtggtcacggcatctcagaacaccaaggccacttccagtccttctcatgctgccatctttagcctcaaccttctgcctccctcttccagtttttttttttttttttttaacggaatctcactctgcactcaggctggagtgtgatggcacaatcttggctcactgcaacctccgcctccctggttcaggcgattctcttgcctcagcctctggagtagctgggactacagatacgtgccactacacccggctaactttttgtatttttagtaaagacggggtttcaccacgttggccaggatggtctcgatttcctgacctcatgatctgcccacctcggcctcccaaagtgctgggattacaggtgtgagccactgcacccgggccctcttccagttttaagaactcatttgactagattgggctcaccagagtaatccagaataatctccccatcttgaggaggacaatgaagccgtctctttttgccctattaaggtttgagcattttggatgagtcattattctgctgattcaggtagttttatgaagtccttttagaattttagctacacatggtcctgcctgaattacatatgtttttcagtgtgcagtggtggctctctgtcaacattctggatggtagggaaggacaagggggtttgtcataggtcttctgtagccctaacctgacctaccccagagctctgagagcaaaatgtttgaggaggcacgcgggcagaatcctgaatcagtggttcaagagattcttcaggtttaaaattttacatcttaaacagtcagatctacgaaggatttattttatattggaggactaatctatgagattccttcagatacaggctgttcctcaggcaaatgccatgaacttaactatgcttggactgatttaagtaacaggtgtcatgatcttgaagctcaacttcaaggttaagttgattggctgagaagtaatatttaccctaacagcttttattaaaatcttggagataaagtgttctctgcatgtcagacatttctccaggaaccatgtttaaatgtccttcacgtttacatcataattttacgagtagggcaattactttatctcatcttgagtgagacactaaaatatcagaacctccttaatattttctactgatattccctcatcattctccttatttctttgttttgtttttgttttgttttgtttttttgagatggagtctcactctgtcgcccaggctggagtgcagtggcgcgatcttggctcactgcaacctcagcctcccgggttcaagcgtttctcctgcctcagcctccggagtagctgggactataggcgtgtgccactacaccgggataatttttgtatttttaatagagacagagtttcaccatgttggtcaggctggccttgaactcctgacctcatgatccgcccaccttggcctcccaaagtgctgggattacaggcgtgagccaccacaactggccaattctccctatttctattctctgactcttagtatgtgaaacaaacaaatacatttaacaaaaagcaatttccaagccttcatacacattgtttccttttgctagaattttatttcttcttcccatttccctccagaaaagcttttaattgcctgttgaaaccccacccaaattcttctacaaggaagccttcctttattccttctaacctgcatagaatgtgagttattctagagttggtttttatccccagaaactagtaccatgttcaactccataaatgctaaatgtgtctgcctatcgattgactaaaaatagctattatggaagcaataaattcacaaggttacatctccggacttttgctgtagaatgaatataagcagaatcaattgtttctttcttttttctgataggataaatattgtttcgtttttatttgcttgctcaatatttgtaatgattctttagattacaaaacctgattgacaacctcgagttcagagaaatctttcttttattgaagacccaataaacacattattttgaaatacttttctgtgtcacaaatgaatattacagcaatcaaagaaaataacagactgggattatttagctcaaagctcataaggaagtctaaatattcagttgaccttctctatgactaagtgtccatagcatgttgaatcccacctttatgtatgtagaaatggcctgagcgattgagaaatactacttatcactctttgatcagtggcagaccatgcttcaccatgatattctctacctttgattctagcttaaatattaaaaaaaaaaaaagagaaggggcttgaacctattatcccaacctcattttgcatcttccaagtgcaaaatagatccactatttgccttttcaatgcaatgttacgtttccttattaagtactatgttactaaactttacacagacactgagaagtggaacggggtgaaaggtcaccatataaaatatatgctttcacatattactctctgtagaacattttgacctgaggcaattcttcaatatcataaaatcatttaggaaaaaacaactaccactagcctgcacttgacaactgatcatgggtctcaatattatattctcccagaaaccaaagaaagaaaaaatgatctcagaaagtcctgttgttttggcaagaagtgaaatgcaatcacataaatttcaacatattaagcggcagttggtattttataaatggttaatgctggtataattccaagatgcattagaaatattagagtcagaagcagcattacagctcagcaattctgcacataatcaagagttgggcagcatccacagacagtttttattacacagacaggcacttgagaatatgtttctggaagcaaaatgagatgatgaggagggaaattatgtaatgagcaatgccaaaataggcataaaggaaaattattcattgggaaaaacaaatgcatttgggcatagaagacatttctgacaatttgtctacctatagaaagtggtccctgttcagatattaagaaaaacacaagggtattaacaaaggtggtaaaagtaccagagtttagttgattcttgtttatgttttcctcctcatctttcattctggaattgtcatatatatatacactcatgcagacacacatattttttatatatatacacatgtgtgtctgtatgagtatatatgcgtatatatacatatataatgtatatatacattatatatgtgtgtatatatctgtatatacacagacatgtcatataatttcagattaatgaatctttttaatcaagacccattttttttttaacttctcgtgaattgttccttctccaatccttcaaaaacagagacacactgagctgcaggccttgcccagtcattctttggcagacttggaaactcagctgttctcatggctttgctgttaaacataccaaaacccagacggcttcacatagttttccctgggattcaagctgttttgattctccaccttcaactgcccatttaccatctccacaaaagatttccgacatcatctttcttcctgatggaaatttctactccaaatttttaattatttttttcccatttcatctctttttcccatatactcactcaggctcaacattctttttttttttttttttttttttttttttgggacagagtctcgctctgtcgcccaggctggagtacagtggcacgatctcagctcactgcaagctccgccttccgggttcacgccattctcctgcctcagcctcccgagtggagtagctgggactacaggcgcccgccaccacgaccggctaattttttctattttttggtagagatggggtttcaccatgttagccaggatggtctcgatctcctgacctcgtgatccgcccgcctcaacctcccaaagtgctgggattacaggcatgagccactgcgcccggcctcagaattcttaaatcttccttattcctttatttctctctgttaggataactgcccagtctccagaatctacacagggccctcatattccccctcacatctgtccagtctctttcatggccatttctctagcttatcacttcatacctcaagtagcacagcagttggattattggtctgcttggccttcctctttccttctcctactttgtcctagacaacactaccacaaaacaggcaatggcctagaacacaacctcatgtgaaaagatcttcagtgttttcaattggcctgcaggttaaatccaaactacatcgcatgtcaattatcaaatgcctacattgaactctattcttattcagtattttgggggaggggctacaaaataattatacacttttgctcacatcattcctcttttctgggatgttctttcctacatatctttttttaccaaagtggtagcgttttccataatatgcaattcaagtctaatcatgttggatgaagagcaaaagattaatttaattgggttttagttgaaaatatttttcagagcctaactatccttatgagttatcaaatccttcatgtaagaaaactctgttatgcaatggaagcaaactgtgggagaagtggggcaggtgttgtctggatctgaaagtgggtggtaggtaacttgtatggtatttcctgactggtgggtggcagatttgaaaccaaatcctagatcccttgactcctaatcaacatccctaccctataatacgactggaggcatcaggacctacccattaagtaatacagacacatagctatcaggagtcctagaattgaaacctgactctgccacttaccaggaatgtgaagttagacaaatcacttaatgcttctgccttcatttcctaatccgtgaaattgacccaacagacattataagtttaaaacaaggtaatgcaagtaaagtatttagcacaattcctgcagtgatgaaaacccttgataattcaagccttgttactataacaccgtgactgtagaaaattgtcttcaaccactaaaagaatgatgtttccaaataccagtggcctaaaggtggagtaagtgacaagttattttcaactctgtgaccaaggttatatctatcctttaattagctaagactcaagatgtttttccctcccattctagatgagatgtattaattatatccccaggaatcaaagaacatcttacaatttcatcagttcatttcacatttgttatgaattccttaggtgaatattcttaaagtgatattgtcttggtggttaatcgggttttccacctataactgaatattttttgtgtgtgtatctctcaccagtctagactaggaaaattatagctacaggaatcatttttaaaaatagtacatatcacagaacattacttagccagaaaaatccacaattattggattaagcaaactaatcatctccttgagaaccaactgcccactagccaaattgtaccaacagggacgagtaacatttagcttttggagaaattctaaataattccaagtaattagtgcaagaactgtatgaaatagccaaatacttattctggactcagactatctgaattgatattctgactgtgatttactgctgtggaactttgggcaagtcactatacctttctgtactggcttccatctcatttttatttcatgagattgttggaatatgtaagtgaaagtatgtctatagatcattcagcatactttctgtaacacgagcacctacaatctaaatagtattattactaatattactgttttccttctggtaatttatccaaagatgtgctacacttgacaacagcttctgaattctctgttctccatcctacagacttacgatagtcttccttttctttctctatcatttccttaagtaagcaaaaaataatttagaagttgccaagtggggaaaaccccaatctattggagagtatgacagcaaggggtggcagcggtgggttgaaggtcttactcaaagtgtccatgcctagggatgttagacagggagtgaaatgatttttaaaaaatctgaattagcacatacaataccaaattgcaacagctgccaggaagggtatttgtgcaatatctactgataaatgagtagaatgttctttccttttccataaagggaatcttgttaagtgaagtggataactcttaagagtgtaactagacttggcaaatcaatgcctttctggagaacataattgtgctttctggagctagaccacaggcactcaattatttagagggactctcgggcatccagcccatcagctcttgggtaatgcttcggaagtcacgggagttgcttatctgagctgctgagaaaggagaatgttttatgtcaagctataaaatatacagcacataacaccctaaagtgtctcctattatcttcttgtctagctgttgccttaattctgcagagatacagagataggaaaatacttgcagacagaatttccagtgctttctattatctgaaattttctctattttaccttttagaaaaataaatcttatttgctttttttagtaaaatatgtttctataggactaagcttgttgtctacaaaataatgtattactagttagaaatgttaacagtacaaagaaaataatcatcattattttgtgtgcatatttttggcagtctacccgtgcatatgagttcgcttgtccttacaacagtctctgagatttgccaagtggtttgccaaccccacaaagccaataaatggcacactaggactgtaatccaggacctctgactttatgtccactacgcttcataacaccttattctatctttggaatagaatatattgcccacagaattataagttaaaaataacatattataaatacataatcgaatatattttaaaatttacttactatgcagagtatagagtatgtgccattttcaatcacttctcccaaattcctgtgccttctgccaactgcatgccttgtattcacttttccactcacatttcagtaggcgagaggtcctgaaacctcagtatacaggaaagacccgctgagtgcctaatacaattcagatgtcttggactttgcccctacaaacttgtgatccaggtggtccaatgtcacatcctaagaaacctgggactcagctccattgttaatcactactgcattcctcatgtctccaggtagatttctgagctgctatttccacactgccaccacactcgactctctctgcctctgaccttcaatggcacaaaaccctaaacgtggatcctgctctcaatcctcttcctacttcccaatctcttttctctttatctctattcaaaaatcacaaaatgaaacatggctagagaaagataaatccagactccacctattcaagcaaaactctatcgggtcaggatgatggcttatgccaaatagtagcctgacatggtgacttgtgatcttactaggtttctgcctttgtagagcaactgagtctccccactagagtgatttttgtactttctaatgttacccaatggctggaaagtaagaagctgcatctccttgacttcggctgtaacttgcacattggagtaacatttttaatatcccactagccagatgtgacttcttaggccaatgtgtaccagagcacaggccttcaggttgctcttttagacacacccacatacattggagaatctggcattttgaatggggtcagactttaggcccaatttagcctttttgaatccttactccacctctctttcttttcctttctgaatatctaaagtttcaaaatcactctcatcaagttatgctgagttttaagaaaaatcattgatctttcatctgtgtcaccaatagaccttctccatttttgagccatgtaactggggtctgatctcttccttagaacaactgagggctgagggtttggcccaggtttgtgtttcaagagccagagctgggaatgcagtacaatttattggatgattgtgatgaagaagcagggagtgaagagcaaattcatttttggcccaagtgtgtaagagaactgaaaggcagggtaagtaggaatgggtaaaatgccaccatggtatctaaaacatataattggcaaaaacaccaagagtagtggctcacacttgtggtcccagcactttgcgaggccaaggtggacagatcacctgaggtcaggagttcaagaccagcctggccaacatggtgagacactgtttctactaaaaatacaaaaattagccagacatggtggtgcgcacctgtaatcccagctactggggagactgaggcagaacaatcacttgaacctgggagcagagtttgcagtgagccgagatcatgccactgcactccagactgggtgacagagtgagataccgtctcaaaaaaaaaaaaaaaaaatggctaaaacaaaaattgcatttcaacctgagggtgaaagggtgggttaagaattgttagcttggaaagcactgcagaaaagttccaggaagttacagaacacagagcgtgtcagccttttatggaatgctcatggctaagcccaagagctgagagagagaattcaagcatgctggccagctgaaagaatcctgcatttgtatactctcaaggaagtagcctaccatactagagatttttaatcattttcccaaatcaacttatttaggctgagtaaactacacactagcaagggtacttgaagatcacctcaagcaaaacagtctggattatttgagtaaatattcataagctgcggtcctacaacattctgctagtttggtaagcatacactcagtaactgtcaatgcacttttgttgtgacgatgatatccagatttttattttttcctccatttgttaaatatacttagcacaattgaacaatttattacctctaaaagtattgaatccctgccatcttgaaaaatataccagcaactagcaaacaattaaaatgtataggccattaatctcaagaaaggctatgaataaacaagtatctctcttgtcttccactactcaaagaaatttcactatgaggaattaggaagcagctactggtctgtgtacggttcagttactttttgttttgatagcttctgtccacctcatatcaacattttcttcacaattgtgctagccatcataagtttccattagtgaaagctactgacttagggttctctatcccaagtagccatttactttgttcaaagatctgtatcactgatcattactataaccctttggagattttgttttgttttgtttctagagatggggtcttgctctgttgcccaggctagagagcagcaaagtgcagtggtatgatcatagctcaccccagccttgaacccatggactcaagcaacacttatgccttagcctccagagtagctgggactataggtacatgccaccatgccagggtaatttttactttcttttttagagatgggggtctcactacgttgcccaggctggtcttgaactccttttctcaaagttatttttagtagatgtgccttgtttcacaaaagtgaaaacacaaggagaaatatgctagcaagtattgcaccacgtacattctttatgtactttctagtctcttaaatactctaagaaaaacgtcaatggtaaaacaaagcagaaaaaagagatatccaatgcagtgagtgtattagtttcctatttctcttgtcataaattgccacaaacttagtggcttagaataacacaaatttattatcatactgttttggaggtcgaagtctgaagtagatctttagggctaaaatcaaaatattggcagaactgtttcttctagagattttaggggaaaatctatttccttgctttatctagcttatagtggctacctttattaattgacttgtggccccttctaccaccaccaaaggacttcagtccaatctctgcttccaacttcacatctctctgattttgaccttcatgcctacctagttataagaacttttgtgattatattgggcccacccagttaatccgggataatctcaaaatctcaagatctttcatttaatcacatctgcaaaatctcttttattacataaggcaacatagtcacaggttactaggattgagatatatctttggggacaattgtcagcctaccaaagtgacattttatactgtaagctgttttgataaaagttgacttttctaagatttactgtcttactttttgtgtgaatctattgaaactcagaacacgtaaattggatctgccagaaatcccatctggaccttgataaagctcaatgttcaattacactaaatcattctttttccattaaaatgatgactctttcctctattgaggtctttgtgcaggcttgctaccttggcatagaatgtccttcctccttctcaaattgttggtaaatctctgactagacctcaagctataatttaatggttacctttttcttttgtttgctctgagtccctttttcttcccacaaagagtagttaggtgatttttttttctcatagcactttggcagtctccttatgtaagattccccatgcaaaatatgcacccatgtaatatatggattgagtactttctatatgccttgttctgtagtaaacatgggataaacaagaaaatatgaaaaaaagataatttatccaaatttactacacacttacaattatacatgactctcttgaacttaattgaagcaggattcatcacaatgtccacatcaatgtgcaaaaaatccctttttattatgaagtaatgtatacaaaacaatgcccataaccccgttcctactttagattattttctgttatttttgtttaattatttgaattttttactagacaacatatcccttttaaaaattaaaagtgatggagatattttcaaaagcccaattcaaaccgagttagtatttacaaaatttcaattctgtccccagggtttatcatgtaagaccttaatgatattaaacatatgtgcaatagtaaaatcttagaagatgcttagtaattgtactctggacacaagaaaaataaatcatattgcagtccagctatccttcattcaacaacatataactttaaggaaagaactagagaacttgagatgcacacaattccagggacaagtaattcttggaggaggaacaattaaccgatggttttatctgaaaaagaaacatgtgccaaatgaatctaaatggtgcctaactctatattccatttggcactccatgtatgaacctctccctatcccttgctgtcatttttcctttcagtggggtgatggtgagagcaatggcatgaagcccaggaatgtggtaagataatttctatacaggtcaagataaaaatcatgaaaatgtaaaaatccaataattcatgttttgggccaggtcaaaacaacatggggacatcaaaacagcctttagaagaatcatgtatctcttttcgcatattttcttgtttatttatcccatgttgactacagaacaaggcatacagaaagtactcaaccaatctattgcataggtgcatactttgcatgggaagcactcaacatatattgcatggcatgcttgagttgctgtaaattattttgtctcccttaagaccataagagacgcaaaggagcaggattagcaaagtttatagcaagccatgagccaggacagatacagtggaatcagtttgcaaaatgccttggagtccttactttaggaagtggtacttcattttgaaagaaatttggaaccagagggatttgaacgcaggggacctcattgatcaaatcctgcatgcataaagactactttattagcaatgcagagactaaatttgagagtggaaaggatggctattataactccatttggaaagccattgcaataactaaaacaactataaacatggaacattcagatttaatttttagaatatgtgcaatagaaaagaataagtgatattctttgtaatatgacatctgtagctgcatgttgcttaaacataaatatgattaggtgctagaggtaatggggtcaaattagtctattatctagttattttacagggtctgcactctacacagaaacttgctaatgtgaatatttagtaggtttgaacccatgcagtgttatgaaagagtatcagaactatcaatgtgtgatatgagttgccatgtatgtatgggtgcacaagtgtgtgtgtgtgtgtgtgtgtgtgtgtgtgtgtgtgtatgagtttctgggtgagaaaattccacctgaggcagaaggagaaaatgatgttgagggtcaactttacattcttactttccattttaatgttgattgaagattcttgatacaaatatgtctaaatatcatctgtacacaatcaattttaactaaattttatagaaaactcattttttctagtagccttaaatctgtttataccttgctcttcaaaatcaaagcatttaatctcttagagataataaattaacttctgtttacattaaaatttattgggcctactaaatacagatgctagtcattacctatttttatgaaagtggtaagccatttcagaatgactcatataaaatgaattgagtgggcacaaaaatctgaattattataattaacaatcataggaaagaaataagaactaacttaaggcttttctgaatatctgttggtggcagtagacacgtataggggtgttctagtccaaggaaagtattgattcatttaaatttgtccatccacatgagtgaaacagctacgctcattttcagatcagtgaatgcaacactcccaagtctaatcgggaagttttgcagacagccgttcctgtttgtttattgattgtggttcaacggtagttctcattcttccaaattagaacagcagacttatgttgtgtcaacaatcaccttgcttttaaaaacgtctctgtgcatgcaccagagacacactaataaagaatctaacacaagccaaatcttccatctgctaggggataatgcccgtctgctgtcagaagcaagactggagtaaggtgcaggcaatgccaagacttgcagtgcccgtctttttgaaaaaaggccctagtgggataacagatcgtgttcgtctaaaaaggaagacaaatgagtaacttgtgtttaataacggccatccgctgacacttactgttaaaggagaacaagagatatatcttggcagttttctacatctcattttgtattgagtccaagtcattgacatgagaatgtaacataatctaccttgcggaaaaagtggagaatgatctgcttctctctctacatataatttccaactgagacttccgcttttcttaccattactcaaattgcccagtcagaggcaaaaacacctggtcatatgaatgcatttccccagctgaatgaaaatgggtctgctgggtgaagagaattagaatttctttttttttttttttaaacttttagtttaagttcaggggcacatgtgcaggatgcgcagatttgttacataggtaagcgtgtctcataggggtttgtggtacagattatttcctcacctgggtattaagcctagtatctattagttttttttcctgatcctctctctcctcccaccctccaccctccaacaggcctcagtgtgggttgttcccctctatgtgtccatgtgttctcatcatttagctcccacttatttcatggcagttttgtaaagagtttttgacagttaactgattgcacagtacaacagaatgaaattacattaaatctatgtatttgcatagatttaacaccatgagtggaattaaatggacagaaaactttttgatttttttgaatcataaatttaacaccatgagtgggattaaatggaccgaaaactttttgattcttttgactcataaatttcaagatcgtcttgcctggcagttcttcctgctcatctataatttcctggttgggtacctgcctacaactgccagtgcttggtttcacagactcacagctaacttagcaactgatcatagtttaaaattgtaaaattccatcaatttttactgccactgtctgatgtgaaaactagaaaagaaacatagtcagatgtagatatctgacggtccacaacataaagattatacgaagtcggccgcagtgcagctaaaaaatatttaactgagaaatgtgacttgcagtccaagagacttgtgccaagagagggttggtgacctgaagcaaacccaggtctctgcttcttctaggaagttcatgttctcaccattaactgggaagtaatttacaaagaaaaagaatggggaggggaggtggaggcttccacttaaaaattttcccctttgttttctcctgcccattccccttaagcaaactttaaggaaatgactaatttcagatttttgtcttcctgaaaattagttctgtggccgggtagctcactcctgtaatcccagcagtttgggaggcagaggtgggaggatcacctgaggtcaggagttcaagaccagcctgaccaatgtggtgaaacctcgtctctactaaaaatacaaaattagtcaggtgtggtggtgggcccctgtagtcccagctactcgggaggctgaggcaggagaatcacttgaacccaagaggcagaggttgcagtgagcagagatggcgccattgcactccagcctgggcgacagagcaagactccatcttgaaaaaaggaaaaatagttttgtgtgattctcttttaagtactgtaaaggtacttgtattacttgtatatttatcataaatgtaaccagtcttagcctttagttagatttctgacacaggtcaaaaagctatgattcttctagaatggtggtgaaataactatcaacatttttattacataacatatgggagctcagagaatggtgcaggcactatctggtcctgactgcttagaccagtcagatctttaagggcaccgaggttctttatcaagatcagacagactgaagctacagctgttctgcaacaaggtaggtcagagaacccgcatcaacactcacctgtatcagattactgctcaagcaaaataagaccctgagctggatttcatgaaaacaataatggaaaaaaactagcttgcatctgtctccagtcatgcctgacctgtgtacaaaggggaaagaattaaccttcccattattagtgtcttcaatttcctgaaagggaaaaagctcttgaaatggaaaactaaaggttttatcatgttgggaataattgtaaaatcaatcccattaacgtattctaagaatctctggcactgggcagtaggtagacccaacctcttctcagtgctccttattttctgtttggcttccttttctcatccattcatatggatatcttttccttttaaaatttccagttgttttatcacaacatagagcaacagaaatggtcaagaacaacaacaacaagaaaatattagcaaaaaaaaaagtctatttttaatctacatctctattaataatctccaaagtacttcgtataataagctgaagattctggtgaagattcacagagaatttctagtacttagggtcaatggcctaaatcataaagtcattttctttcagtaatgaaagttaaataattttataagaagaggatttctcatgaaagaaggcaggtggtgaatcttctgttcatttcaggtgcctaaaatgcaatgatatttgcctactgacagagaagtgagatgttaatgtaattgttagagactttatattgatttcagattaatatcttctaaactaattgacaagttgcttgctatttagaaggcaaacagtaaaagagaaggcaaaaaggaatagagatttttgattacttagtggattatctacagtgacttacttattccactgaatattcaacattaaaaaaatctccttaacttaccttttaaacaagttaatcagattaactatgccactgtgacaaattttaaatttaaaatcagggtacacagttagatgaagtaccacttctgagtgaaagcagttggctgggagataacattttgatgctaaaattaggcaaggatctagaactagaaataccagttgacccagcaatcccattactgggtatatacccaaaggattataaatcattctactgtaaagacacatgcacatgtatgtttattgtggcactgttcacaatagcaaagacttggaaccaacccaaaagcccatcaatgatagacttgataaagaaaatgtggcacatatataccatggaatactatgcagccataaaaaaggatgagttcatgtccattgcagggacatggatgatgctggaaaccatcattctaagcaaactattgcaaggacaaaaaaccaaacactacatgttctcactcataagtgggagttgaacaatgagaacacatggtcacagggaggggaatatcacacaccggggcctgtcagggggtggggggctaggggagggatagcattaggagaaatacctaatgtagataatgggttgatgggtgcagcaaaccaccatggcacgtgtatacctatgtaacaaacctccacgttctgcacatgtaccccagaacttaaagtataagtaaaaataaaaataaaaataaatttaaaaaattggggcatgccctggatttctttgaaaacagtaagcccacagtgtaaatgttacatcctaaggattctatacctatgaatgccacagattataaacatattttacatgttaatattcaaaagggtaacatgatgctgttgagctgaggttgacaaaccatagcccatgggccaaatctgacctgctgtcggtttttgtattgcagtcacttgcttagatatatgtgtagtgcttttgcactacaatggtggagttgaatagttgtgacagagactgtatggcctgcgaaacctaaaagactcactttctagcactttacaggaaaagtttgctgactcctgtgtagagtgcttgaaattaatgtttatctacaactttttttttctcttgggcataaaggatgacagtaaatctccatgtctgtgtgcatatgagtgaggcaggcaggaggattggcaatcacatgccactttgaagtgagttggcatcaaacataaaattagtcttttgtcacagattttagttcttcctgcagtcaattatctgtatcgttgtactattgcacacaggagattcataattcaggatagagttagttgctccattaggtcagctgtgcattagtataaagaaatacccaaggctgagtaatttacaaacaaaagaggtataattggctcacagcactgcaggctgtacaagcatggtacccgcatctgcttgacttgttggtggggtgggcggtgggggcctcagggagcttttactcatggcagaagctgaagcataagcaggcatataacatggaaaaagcaggagcaagagagtaggggtgggaggtgccacgcacttttaaaccaccaaatctcatgtgaattcactcatcaccaaggggtagtgctaagccattcatgagtgatccacccccatgatccaagcacctcccaccaggccccaccttcaacactggggattacagttcaacatgagatttggctgggacccagatccgaatcatatcagttgcttacagagcaactcggccctcttttaaaaagataaatggctcaaattgcattcttatactaaaacaggcctagatgtatttgtgccaggagtatgttgttgttttgtgtgtgacaaaaaagctttagatcatgccaagtaatcacactttgattcaaaacagaggccacatgtttctgaaatcaggacctctttctactgcttttcagacatagcatggctctccaaggccagaaaaattgagtaattgttgttactattttagacttttagatctacccagggggacttgtctttctccactgttttatcgtggtgaatattactgaaactgccaagccttattatacacatacagttaagctattactgaatccacctgctccactccaagtctgggaatcgctgttcaaacaacagagtatgaagccgtcattaaaactaaaccaacagtaaacccagacatagatcaaagatcatttcagatgccagttgggctaatcaatgctgcagtaattgagcattgtttttgtttttgttttcataacttataaacactttcaagtacattatcacatgtaatcctcattgcaactctgtgggggaagatagggcagagatcatcatctatggggtcattttataaaagactgattttagagtgaaattataaagactcaaaatcttacagagaaaattaacaactcataaatagaatccaagagactttctgcttagtttgcaggattatacggttaagtaatagctcaaaaatcacatagctaagaagtggctcagatgggattagaacccgggcaatatggctgtagagtatatacacttaatttcaatactgcctcaacataacaaatgcttattgagcagttaccagttattcgtatatgaaacacgcagacttcatttagcgagtttctgctgtatgccaggcactgcagagagggtcctgaaaatagaacaaggagcaaggcattagccagatatgtatttatttacttatttctgacctaccatgattctgatggttctttgaaggaaaagaccagggtgctactgaacatatagcaggaggtcctgccttgcttcagaggaaggaaattttcaggtgtagcttcaaagatgaatgagctctatggaaggctggggaggggagacacagatgcatgaagaacatcttaggtaaagggattggtaagtgcagacatttgacataaacaatcatggaaaacaatcaaacattctccttgactttcaaactctagtaaacacccactccatgattcttgacttactttcctcctctgtcttctccccttctaggcccttatttttctctcttcctgcttatattagttttgcaagttccctttcctctgctcactcattaaaggttgctggttttcagcgctctgcccttggatctatttagtcctcactttaacacttagattgtatcatccattcatggatttaattactatctacatactaaaaaaaaaacaaccacactctacattcagttaataagtctattttaaaatcaagcctgtggttttggcttaacttctagtggacttgcctctttaaaagttttgtaggtatcttaatctctacttgcccaaaaagaaatcattattgtcctctcccaaaaggctcctgctcattgctctgtataaattaactaaaccagaaatctggttccatgcaacttcttttattttaaaacaaaattatcccccttaaatgcagttctgttacttctgcttaccaagcttttctcaaatgttatttctttctactctcattgccattaccttgtcatactacctgtggcagctgtgtaacgaagcatatactcccttgctaatccatcccacacgctaatcagaagaatctaccaaaaatgcaaatctgattattccattctcttcttacacttacatggcccttgggataagatgggagcacagacttccgttcgtatacccacctagcaccacttcagccccatttattatcacttctcacccttctcatctaccttccatctattctcaactttcattcggcacatacttttttttttttggccttcaggtctattattctgttacttcctcccattctgctttgcttaactctctcccacttaccctccatgtcctgaatttgacttcagaatacctttcattattctgtaattttaatgggtcagattctcctattatggttctataaccttgtatttccctcaacattgtattggtcatatgttatgatattgctgatctaattatttgtgaatacagaatacatgtatctctagcttatcattacagctatagtaacattgtgcctggcatatgggcatacttgttgcacaaacaaatggtttgtccttgaaagtcacatacatgtaacagcacagaataacatgggcttttggatgagagaaaagtttgaatcttgggtctgtcatttatttactgtatttgttttgacaaattacttatctggacctgttttgtatgtacaaaatgagtacaatagcaatcaactcatgaggttgttgtaattgccaaacaggcctgtaaagaactgggcacatttaagtgctcagaaaagggagcttttagaattattagctgattcattgaaggtttcattaagtgaaacttacatcaaatgcctatttgttcagaaaatgttggtgtgatctggcaagacataatcctttccttgatacttaatttcttgaagaactgtgttgtttctgtgtttatgttcctctctagtctgtttgtttgttcagagatgggtctcatcatattgcccaagctggtcttgaaccccaaggctcaaatgatccgcctgccttggcctcccaaagtgctgggattataggcatgagccaccatgccagccagaagaactgtcttaattttgaaattcgattttcttttacattctgttcaaacttccaaagaagattcactctcaaggagtcacatcagacacaacttgttattctcacataaaacttactttgttcactatcaaaagttctatttggagtcagatatggtggctcatgcctgtaaccctggcactttgggaagctgaggtatgagcatggcttaagcccaggagtttgagaccagcctggacaacacagggagacttaatctgtaagtatatatgcataattagcccagcatggaggtgtgtctgaagtcccagctacttgggagactgaggtgaaaggattatttaaacccaggagtttgagactgcagtgagctatgattgtgtcacttcactacactctgggtgacagagcaagatcttatctcaaaaaaaaaaaaaaaagttgtatttgttggttagccagtgtcttagtttctcgttgctgcagtaataagttgccataaacttgagggtgtaaaacaaatgaaatttattgctatatttttcaggagatcagaagtatgaaataggtttcattggactaaacgagaactattttcttgccttctccagctttaagaggcttcccacgctacttggcctatgctacttgtccgtcttcaaagtctgcaatggccaatcaagacttgccctgcctcactctgatgctgcctcttttacttccttcttacacatttaacggtacttgtgatccctttagacttgtctggatgacccatttcattagccaccttaattccatctccaaccttcattttcctttgtcaagtgaggagccatattagcaggttacagggattagaatgtagacgtctttggcagggcattattctgtctaatacagccattctgttgcaggcatcatattaaactaagtacttgactgaaataagcacagttaatgctcccagatgtcctaagaggtaaatcttattgctccactttgtagataagaaaaatgaaactgcaagatgtgctttcttgctgattgtgactggccatcagcagaagagggttctgagcctctttttgctgcctgcagtcgggttctgtgctctttgcaaggaggtcctgaagcctcttgtgtggggccctcctgtctctgtcatctcacatccttatcaagcatggtctccaggggttttcccagttcattgtaagaagaaagaatatgtattaacattcagcgtattatctgaaatacattttatttatttttctctgctgcaataacatagggaaatctaaatatccaagccaactctaattttcaaataaaaaagtgagcttcttggcacagaaacacaaaaatcaaaatccacaatttataaaaattgaagccgctttcaaaattaattttaaattgacaaataaaggtggtatatatttaaggtgttcaatgtgatctgtttgaagcagatttaaagactgtaatgaagcaatgcctttgaatacacaatggccatcctgaaaaggtttctatttcttttgcttcttaatggcagaaaaggattgaaagatttcttgtatgtgagtgaaactgctctgttcttgcatactggattctgttgtaaatgtcattagtatgtatttcaatgtgtttgactcatggaggtgtttaaaggctgtgcttcatgaatcacatgttaccgtgttaataagagatatggcaataaaattctagatctgaggtggaaaaaaattcaaaaaaaattgaatcagttttactgagtgacatcttacaggcaatccaaattccgtttaatgaactcctgcgtgtttttaagtgtaaagaaatgctaaatcatattcctacacctccaaggtaattctgcagtttaagtgaagtttgcaaagttcagcatgaccttgcaaggtaaccaggcagaattaaaacttcccttctcccaccccaatccattaatatttctgttttaattcctttatcaaatgtttcctttcccatggtgcagatatagtgctgaaagctttgaagatagactttgttttagtccctatttcctgttacccttgagatttggggctcgagtgaggtaaggagaaaaaagggaatcagatttacaatcattttaacagctctaaagacaggtttaatcttcaccctgatcaagataatgaagtagaatgatattaaaagtctttcaattctttgttttcttgagcaaaagaaaaagaaatagtgtctcattgcattggaaaatatacaagccctcttgggataacaaacataattcattctcactcaggcaaccagtgaaatcacttcctggttgctgagcttataggttattgaaaccacgggggttttgttaaatataaccatctaataaatctgccccttcttgtaattaggacaatggtgataaattttctatgaactttttcctcccttttagggcaactttaagaaatctccaataatgcatatgtcatgtagagttgaatggaattgaaacgccctgccttatctattgctgtggattggcaagagaagacagtaagtgcttgaagcatagtgatggggtaaacagcgcatttctttctttgagtgagtttaaagtttcctaaaacattgggcagtctgaacttaacacatctccttgatatcatctatcttaaaggaaaaagccatttcccatatgttttcaggccaaatagaggtgataccctcattttaaaattcagaaatgttctaaaaatagtctttaaacaaaagtaaatacaaatgtcctataagagcatcagggaacttgattatttaagggaggcaagtggaatcaacttcaagttgatttctcatactgtacacaattgctatattccctcatgtaagtacgtgtggaagctatggcttcattgttaggcactggatctgaagtcaaagttctcagattgaactcttcaaaatggctcctacacacccaggacttgggtaaaggctaaccccactgatcttcagtttctccatctataaagggaaaataatattatcaacctcacattctttgtgtggctcatatccatatattcatttaatattaattgagctactaataaaataatagtagcagaaactaagattcattgagctatgtacttttcctatgtactgggcacacccctggcatagcataaattacaagtgtgcctaaatattgatcttctctggcctcagagaagccagaatacccaggcaacttgcctctggccacaaatagcagcatctttttaatctactgttttgtattaagtatcatttcctctgtgttggttgaaaggcctaattaatacacactgtatcaattattatgatgcatattagagttaaaaagactgaagtatagagaagttaactagctggccaaagtcacccaccaggtaggaagtgaaactgtcacctgagcctgagtttatttaccaaggatatgctcttatttactgaatgctactccattgccattaatactgttgtttatcaaataattctagttcattcctatttaaggcacatggaaggatttcatttctttgccatcatcaggttagatgtggccaatgacttgctttggtcaattaaataagagaaatggcatgagtcagttctggatagaggcttcaggactcccctttctcaggtcggctgtgattaaagaagccatgaaaagaagatgtctctgtcaacctgttaccctaacagaccacagtgagtacaatcaccttgtgtagcacacataatatgaacaagaaatacactgttgttttgttgagaccctgagatttggggaataattgtaaccacagcataatctagcttgtcctgagacaattatgctgctgccaaatatgtagtaagttgtgtcaatgatgtgtgtcaactctccaaggttgggggaagctcttatcagtaatgttgggggatttttgtatagcaaatactcccactgctatggcctgaatgtttgtgttcctccaaaattcatatgttgaaacctaatcaccaacatgatggtattaggagatagagactgctatggtctaaatgtgccctccaaatttcgtgggttagaaatttaactcctaatgcaacagtgttgggaggcgggaactcacgggaatgagaggtgtttagatcatgggggttctaccctcatcaatggattaaggttgccatgaaaagggcttgcaggaatgggtccatctctttctcctttctgccatgtgagaacacagcattcctcctctcctgaggatgtggcaaccaggtgccatcttcaaaccacagactaaactcgctggcaccctgatcttaaacttttcagcctccagaacactgaaaaacaaatttttgttcttcgtaaattggccagtctgtggtatttttgtcatagtggtaaaaaatggactaagacaggacctttgtgaggtgattaggtcttgaagggttgccctcatgaataagattcatgcctttataaaagagaccccaaagagatactgacactttcctccatgtgaggttacagtgagaagacagtcatctatgaggaaaggcagataccaaatgccgaatctgctggtgccttatctttgacttcccagcctccagaactgtaagaaataagtttccactgtttataagctaatcagtttatggtagttggttatagcaacccaaataccttaggcacccagtaaggttaacttcaagctgccgacatgatggtactgaatgtagagttgggatgaaatggacaaaattggttctggcaagcctgtgggaggtcagctgaggacagcagtggctcagggtatattgtagtgaatggatagatgtgactcctgacttgattgaatttacaggctagagaggcaaaattaaatgagataataaagatgcatatgtattttattttatcaagcatgaagtaaggagctcttctattcttaagagcaagtctttcttaacctggagtccacacaaaaggaaggtgttgggattgttgtcacatggtcccccaaaaactacatacttattagaatctaaatcaatgtcaagctgtaaaattatgattgactccttttgaaatgagtcccaattctaaatttagctaatcctattagaaatattcagcacattgatgcatactggaatatttacacataaactcatgacactaaattcatctggattaaactaaccttcccctgacactgttctccaaataatggcaatattttgaaattttaataattttagaatagattgggactatcatgagtaaacattcagaaacatatgctcactatacaaccctctgtggcagagactggctagatgcttattgattttattctattttgttttcctggacacataagaagcctatacccagcctcctatgtggtaagtttgaggctagggaagaagtgatgtccatgacggtaaggccatacatgattttccttgctctctctgccagttggctggctgaatgtggaagatccagtaaaggactccaactaacggtaccattagagggaaaaggccaggattcccagatcattggtgtaagcccagctgctgaaggccagttggactttccactggcttattttatattattgtagttatagcagctagtattgataaccctgattaacacctcttcttagatagggatatattatatttgcttggaaccaaaccactagcatattattttatatttttacatggataaagaaactggagcctgagagcagtggctcatgcctgtaatcccaacatgttcagaggccaagtcaggaggatcacttgagctcgggagtttgagactagcctgggcaacaaagcaagattccgtctcttcaaaaaagtaaaaacaagctgggcattgtggcatgcatctgtagtcccagctacttgggaggctgagtgaggaggatggcttacgcccaggaattcaaggctgcagtaagctatgattgtaccactgcactgtagtctagataacagagtgaggccctgtctcttaaaaaatataaattaagttgaaaaaaatttttaaacaagtgtttactaaaactctgtggtaaaatgatttttaaaaatcaaatgagtaattaacagcttgtggcaaacacagccttacaacaaccacacggcccttgaaggaaggactggctgtccagctacagggagtacagtcaaccagctgttagctccttcatgcctcagttgcagagagctgcctcgcccttggtcaggcaatgccctggtgccactgatccaatgacccatcatggctggattgaccagtgatactcctgagctaagctctccaaagggtgggctaaggctttgtctggctgacatccaagctgacttttccctctatccagtcctgtctcctcctccttttcacaggggctgagccataaaataaacatcttttatgccaaatttcatctcttcttggacaatgcaatctcttacacagactattgaggggctagacaactgataagaatacatacatttaaaattcaaatttaaatataactattgctccaccagaaacatgctgacagtcatgtgctcatccttcttgctctggaatgaagtctagaagttcttaatttactttaagctttcccaatgctttttcttcttcttcgtcttttgcacttcacttacgaaggtatcgagacatatatttttcttaatttctagcaaataacatttttttcttcttctataccagtgtagaaagggaaattaattaattgattaattcagtgcatctcatggctgttagaaatcatcggaatctatagcaatgaatggtatatcagaatctcattatttcttttttaaataaaaacaaatttggcccatagatgttgatgaggattgtttttatgttagttttacactctacccccataatgatgagcatatttaataatataaggcaaaagcgatctaacgtatctttcaacatttgtctttacaaatgttacaaacctctctccttataatgttataggatggttactcttacaattacagccacggaagattagctgggttgtttattaaaataattgtattagcatgttttcatactgctataaagaatgggtaatttataaaggaaagagatttaattgactcacagttccgcatggctgggcaagcctcaggcagcttataatcatggcagcaggcaaaggggaagcaaggcacccacttcacaaagcgacaggaagaagtactgagcgaagggggaagagccccttataaaaccatcatatctcctgagaactcactcactatcgagagaacagcatggaggaaaccacccccatgattcaattacctccacctggtctttcccttgacacgtggggattatgggaattacaattcaagatgagatttgggtggaaacacagagcctaaccatatcaataatgaatcccattcatgccaatttctactactacagatttctgaagagtatcgttagagccatttttacacagagccatgaaaattattgttaactgtgttatgacatggggtcattatgcaatctccctttacaagaagtatctttaaattgtttcccatagagactggcatttaccactaatgactcagtttttcatattatgaagaataagtaatgctgatttgtgtatattatacgtcagttgctattatgaataacttatgtgatttatcttaacgagtcctcaaaacagccctataagaacatccatatcattgttatctcatttcgctgataaggaaaatgcggcacagaaatacctatgatgtgtccaaagtcacagagttagcacaggtaaaccagaattcatactcaagccccctcttattcaccaggctgtacaatgaatatttaaggtactaggatttccaaaagtctttgagtaaagagcaaacacccataaaaaagataacccaaaagctattattagttgtacttcataaatgcttgttatgtaaatgcctaagtaattgttggataatttagaattcattcatcaacttatcaagcattgctttgggatcctgggtcacaataattgggatgaggaaagataaaaaggaaggagggatggatctaaaacaagaagagctctctggaaaggggagagttggctggggagccacactaaaagggctccttgagacaatcagagagaggcatagaggacagtgaatgtcatgtggcttttgggtgggatttggtgtggagaaagagaaggcagtatggcgccaagaaattattttccctctggctagtcttttccaacattattttaatttctcttttaacactgaagcacagtgacagtatgatatttcactttgaatttccaactagacccaaatctgtttgcaactctaaagccatagaagaatgtttattttacaaaattaaatgtgaaaggtgtttactttgcctacaagatggtgcgacttgggcgccgacatgactagttaaataactggaacttatctgtttaaaagatttagtttctaatcaaaatgtacaatgcaagttctatggattttttgtgggttcccttattcagtatatactcttttgaaaaacattactgtaattctttgagttctagcaccagaggaattacactgtttactaagtgttttgatttttcagcatactgaatccttggaaaaaaaatttgaaagtacgatttttttcccttatgcctatcaaagagaatccaatataaagactcttctagagtgggtttttatttcttagatcatcactttttgaacttttcagttccagtttcactttccctgaaaacatttttacgatagagcaagttcgtaacaactagctttgtaaggtggaaattttttgcaagagctgattacaatgtttacgtaaattgcttcaaagtttggcagctctctttctagagacagggactcttcctgttattatttctccaaaatgtgcttgacattctgattttggattaaataaacaaaattcctacgctgaattctgacatgtcataagcttgacagtgctaaattacctttcaaaagcagcgaatgtttcagcctgttttctttaaaaaaagaaaaaagtaccaatttcttaactgctgaaaaagagcagagctcacatcaagtgtgactcatgataacaaatgtgatgcctctctccctcttccctctgcctcttcaaagattgatcaagtgatagtgattttctgagtcaaaagtgtcatacaattcttaagtggaagagaagggagggtttggcttaattctttatgataattcagccaatcactccaagaatgggagagaatagtattcacaagtgtaaagtataatgatattacaatgtatgtaccaatcatctcccaccaatttattcctgtttaagcagttagcagaatcagtaaaattcgtaactcaagaaaaaaaaaatgggttggattaaatactatagtagtctagctgctctgagctcaagtctccaggacagaaatacacctatgtggcaaatagtgaaactaatttccctcactgccctctctactattctgtttagaaatcttgactgctgttctaatggacaggtgctttcctgctcctaatagtgggaagtgatgtgatggcttaggaatgaaatttaagtacacctctccgaactctgggatgggtggatgataatcttcataagtaactgaagccacctaagaggcctgtccctactgtaaacagaagtcatttttgcccttgttgtaaagaacccactttgtttaatgttaagaggttggtgtgtttaatctgacctttgatttcaaagattgggcatggaacataaatatgctctatctaatttaatatcaacatgaccacattttaattctgctgtataattaacacaattccaatatttaacattcaaccaatgcctcctgagtacctgctgtatgccagttactgggctggaccctactggcaaatacataggtaacttaaacataatggcaacctgaagagtctgggtggatgtcccttccagaacatactagatgactcatggatcacaagcagagaagggacttggtctttggtatagagcagtagttcttaacagtgtggggggcactctgtccaacagagggttatttggtagcatctagaggcattttggattgattgtcacaattggagggaaaaaatctgtgctactggtatctaagtgggtaaagaccaatggattccctgtatctgagtaaaaatgtaattttttggaaacagtccatccatcaaaacgatgcttaatgaccctagagggatgtgaatcagtattacatccatcaagcttcactcttctgcaataactgatttgtacaaaagctagtgttgttcatcagtaactccgtaaatattctaccatgcacaggaaatccgcccccctacccaccataataaagaatgatctgacgccgaatgttagtaatggtgaggctgagaaaacacatacacacacacacaccctctataaataatgagggtggggtagaaaagaatttttagtatttctccacagatctttgagggcagaagagattacatttgcatggggacagcatcaagtataattgagaagtctttgtgctgaagaacgttttctaaaggtcttgccctctgtctttagggactacactgttacaaatgagacatacccacaatccagtcctgaagagtagcagtattttgggcatgtgcttccaagggttagtagatggtgtggatgctgttattgttttattaagggctagtgctaaccactgttctacacacttctaatattaacttcacaaatccattagtgaagtgggtactattattatgcctgtttttatagatgagaaaattgaagtgtagagtgcttaattagtggccctatggtaacccagctgtaaggggtagagccttgattttaaccccaggggtttagcttcagtctttattgctaattgcaaatagccaaactgccgcttcctatgtcacctgttgaaattttactccgtctcagctgtagttcaggtatgtgaccttagacaagttattctctgtgccttatttctatcatgtccaagatatatatactattctatttcagttgtggttggatttaaataagttagtgtgtgtaagcatttaaaacggtgcctagaacagagaaatgtcttagtaaattttatcataatgatgatattgattcttccctatggcatgtgcatcttaagacagcacgtcttcttaagacaatagtaggaaaagtacaaacagcttttagagccaaatagagtttatccataccctttcattatctgtaattggctatgtgacttcgaccaatgtaagaagctctctaggccttatttttgtttgtttttgtttttaacttgctaattgggaaatgaccttttggacaaaacaaatacaatttttctttctgtgaagagtcatagtacagtatctgatataaagaagaataaatcaaaagaaatgaagcattaagcactttgagccattaggaaaacatacatttatattagctttgctactgttacctgatttatgttatttaagtgtattttgtccttttgtgaaattatctcatcttggatcgtcttatgctgctgtaatggactaccatagactgagtgatttataaagaacataaatttattcctcacagttctggaggctgggaagttcaaactcaagacaccaacatctggtgagggcctccttgctatgccctcctcacatggcagaaggcagaaggacaagtggggataaacccaatgtcctcacatggcagaaaagtgcttgagagaaaacccactcctgcaagcccttttaatagtagcattagttcattaatgaaggtggagccttgatgaagatttaacaccttccatcaagcctcacctcccaatactgttgcactgggtatgtattcagtttccaacacatgagttttggggaacacactcagaccatagcatctctgttaggaggatattaccctctgtccttagatagccagtgggtgatcactaagaagttttgaatgatactggtaaatgcagggtgtgtgtgtgtgtgtgtgtgtgtgtgtgtgtgtgtgtgtccttgcaaacatgaacacacatgtgcatatagaaaaccaaagaacagcaaagacttggaccttccttgtctgcttgagcctattggaacattccctttcagcagcccagaagatggattgatgcaaggctggccagcggaaaactggttctggtgagtggtttgagcataatggctatcagaggatccagttggtttagttgaaaactgggagtatataaaaacattatcttcagcttttattgactaaattattgcccataactagtacttgtcctattttcaattactaatatttttctacaacttgttcctttatacactatggcttcttgctctttaaagacatttaaatagaactctctctctctgaagatgtgtccccagtcaagctcctttttaggaaagcaaacattgattatcattgattaggatggaaacgtatgacttggagtcagcatgatacagaattgaaagacacttagggagttattgatgaacaacactagctgttgtacaaatcagttattgcagaagagtgaagattgaaggctgtactatagattcatatccctctagggacattaagcatcattttgatgcattgactgtttccaagaaattacatttttactcagatacagggaatctgttctaagaaggttggcttataggatcagtccttgttatcttttgattattattgattcatgctgattttgtttgaagcctgagattccttcatccgattttaacaaatttcttctgctttttctagaagaggaaaatttatttatttatttattctattcccatccatatgggtttgcaggggtgtccaagggagagaatacagtcattagttcttagtttctgtttttggttgagccactatagccccttcctcatccctcttttccatttatcactagaaatggaaactaaacaccatggctttaggctgctaaaagcctaaaacaaaacaaaacagaaaaacaacaataaaaaaataaagcagtttggacaaacttgggtgaaaatctatgaattagctctgtggtatatttggtgcacgttgagtaaataaagcactttggacaaacttgggtgaaaatctatgaattggctctgtggtatatttggtgcatgttgagtaaagtagacaccatatcgtgcagcttctaactagttaaaggtgatatcaatggatggaatagtacaatacaaaagggggatttgaatttagaagtcttggtttcctttgaccatgtttcctttcctttgttttacaatccttgaactgattctacttctgatcctggtaaggaatcacagaagacattacactcaaggcaggtgctcagagcttcacattttctttacaggatgggttcttgcgtctgctaaaactataattgtcactgattttctaacttcctctaaaagtctgaagatgaatggtctcaatcccaattgccagcagaagtccaagtcccctgatatccattaccatcttgtatgtgtatgcctctatctcccttggttctatcactcttccaaccctcccactctgacctttgaaatcttataccctgccacgagtaaatactccaataggttaatccttttatctaaaaattcttctcatcttgctttagcacaaatgctttgtaaacttatgcatctccagaatcacctgaatgcttgttagagcacaggtgagggtctccactctcagtctctctgatttagtaggtctgtggtaaggacctagaactggcattttcctcaagttcccaggtgatgctgatgctgctggttttgggaccacactttgagaaccattcctctattagaaactggtacaaaaacaggcacatagactgatgggacagaatggagagcccagaataaggccacacatgtacaacgatctgttcttcaacaaagcttacaactacaagcattgggaaaagaataccctattcaataaatggtgctgggagaactggctagccatatgcagacgactgaaactgtaccccttcctcagaccatatacaaaaatcaaatcaaggtggattataggcttaaatgtatacacctaaaactaaaaaaaaaaaaaaaaccctggagaacaaccttggcaatgtcatcctggacgtaggaacagccaaaaataccaagtggaatcacaatgaaagcaaaaattgacaattgtgatctaactaaagagtttctgtaaaacaaaagaaacaatcaaaagagtaaacagacaacctagagaatgggagaaaatgttcccaagctatgcatctgacaaaggtctaatatccagtatctataaggatttaaacaaatttacaagggaaaaacaaacaattccattaaaacttggacaaaggacatgaacagacacttttcaaaagatggtatatcatgcagccaacaagtatatatattaaaaaaaacagttcaaaccactgatcattagagaaatgcaaatcaaaaccacaatgagataccatctcataccagtcagaagggctattattaaaaagtcaaaaaataacagatgctggtgaggttgcagagaaaagcgaatgcttatacactgttggtgggagtgtaaattagtttaaccattctggaagacagtgtggctatttctcaaagagctaaaagcagaaatatcatttgactcagcaatcccattactgggtatatacccagaggaatataaataattctcccataaagacacatgcacgtgaatgttcactgaagttctattcgcaatagcaaagacatggaatcaacctaaatgcccatcaatgacagactggataaagaaaatgtggtacatatacaccatggaatactatgcagctatagcaaaaacgagatcatgtcttttgcgggaacatggatggagctggaggctattgtccttagcgaacttatgcaggaacagaaaaccaaataccacatgttctcacttataagtgggagttaaattatgagaacataagaacacaaagaggaaacaacagacactggggtctacctgaaggtggagggtgggaggtgggaaaggagcgaaaaatacaactgcttggtagggggtttaatacgtgagtgatgaaataatctgtacagcaaacccccatgagaggagattacctatgtcacaaaccttcacatgtacccccaaacataaaataaagccttttttaaaaaaaaaatagacttagggctgggcgtggtggctcatgcctgtaatcccagcacttttggtagatcacgaggtcaagagatcaagaccatcctggccaacatggtgaaaccctgtctctaccaaaaatacaaaaattagctgggtgtgatggtgcatgcctctagtcccagctacgcaggaggttgaggcaggagaatcgcttgaacccgggaggtggaggttgcagtggcctgagatctcacaactgcactccagcctggcaagagatcaagattctgtctcaaaaaaaaaataaatagacttagctcccccaaggatactgtcttccctacatgcctctcaaatggtggctattgctccattcactaaccaagtacaactataacgtaaaatgattttggtgtttgcttggcttctgacagctgtatctctacacctgttcccttcttcctcaaaatatcctcaaaagccatcagattattccacctacaatgctttttatggtgattatttaataagctttctactattctctttttctcgttgaaaaattttagcatctggccaactgtctttcttttttctattatgcttgccaacattcttggtgccttcaccatctatatggatgacccaatgataccagaatggggctttgagggctgggtagaaaatggtggggtccctggtaagggctccaccttcggtcctctgcccacagacgtaagtgagaacaggcactcctgttttcatgctgaaatgttgcactttccaagaccactctggtctaccatgcccccccatcctgtgcccataaaaacctgagaccctagtgggcacagacacaagtggtgggacattgaaaggagcagaacaacacactgacagacaccagcagacaccagcaggccatcaacagtgggatgatgcagaattcagttggggttggttggaggagaatctggccactgagcagcccgactccaggggaagacgaccttcccactccatcccccttctggctccccatccgcctcactgagagctacctccaccactcagtaaaaccttgtacccatcctccaagcctatgtgtgatctgatttttcctatacactagggaaagatccccaggatacagaaagccatctgtccttgctataaggcagagggtctaacggagctgactcacacaagctgcttgaagatggcaaaactgaaagagtacactgttaacacacacccactgggacctcaggagctgtaagcactcaaccctagatgctgctgtggggttggagcccaaaaacactccccacgactgcctgtctgcatgctccccctaagggcttcagcagcagggcacctaagaagcgaatcacacccctgttgcatgctctgcgaggagtatgaggcaactccatccattttaccaagaccctatcactacttctctatcactccacccaccttactctcctcctcacacagcttagaaaccagactttaaaacttccttgaccctcttttcaagaaaaccttcctagattttcctagcaaatgctaacctggcaaagcccaactctacctcttctgggcctgaactcaaaaggccttacacactggaaacaaaacaaaacaacgcacaatgctgccagttttcatgttacatatatgatttttttaaaaaactgcaatgtgcttacagcacaattataatgcaattctccagcatagcaaccaataactgggtaggagttccagaggagctagaagtctcagataagtggttgcaagggtgaatactggagtctaacacatctgcgtctaaacttgtctccgactttcaccaattgagtggcccggggcaagatacctaaacttcttacagctttgttgcctaatcaagaaaatggggaaatgatagtttatgcttaataagcttttttgtgaacatgatatggtatcaagtattcagcatatttgcccagctactagtaagcacttggtaaatactggctagtattattatcatatgctattgaactttaaaaccataccttaatttttaccaaagtagaaatgatttttgaatataaggtaaaagttaagctcctcctatatgttttgtttaacaagagcaattcctataaatgatgtgtgagtgtgttgtcacaacatgaatcaaattggctaaattattcagttatttggatgttctgtaaacctaaactttacaacttgatatttcaggagaatcagcctatcagaacatatatgaatgcatctcttggaataattaattgtttttcaagagcagccattcctttttccccaccttctagcaaagagatcaaatgagaacaatttggaggaagcagtaacacactaataagtcttcactttatgagttaataatttctggtttccttaacaaccattaggagcacattcatgaactgcagtcaaatcattaagaagagagctaacaacaggtgtgaggcttgtttctagaattcagttcatcatagatgcagtcagcttatttttaagtcaattaattaatgacataggaaaaggggacgagaagaggcttagtggcagctaagagtagacagaggactggtaggaatattttttaaaaatatatcagaaaaataattttctaaaaccactaaagtgcaaaccacagttaaaatgacaaagggtcgcctttgggaaattcccattagtaaagcaaagagaaatgtgaagaggtaatgattactgataatggccatgaccttactaatgtctgttttcccatctgtctccaatgccaggaaaccatataaacatctaattatattaagtttaatgtcttgataaaaagcccttgcttattctttggtactcttggagagcaaacattttgagcaaaggttattataaaattgagatcaatatggctattttattaagcagtttttctccccagcaacagatcctttttttaaaaaaaattaccaagtgacaatattaatgaggtttaaagtattaccatattctaatttataggtatgatgtgaaaaattcctgcaaggtacaaatacttcctttagtcccaaaacaaaaaggaaaataacatggccaggaagaaaatgatgaggtaatggcagagaagctaatgaaggaacttacattcagaacaaaccttttatttttttattttttttttttttgagacagagtcttgctctgtcgccaggctggagtgcagtggcgcgatcttggctgcgacctccacctcctgggtcctgcctcagtctcccaagtagctgacactacaggcacgtgccaccaggcccagctaatttttgtatttacttattttttttcagtagagatggggtttcaccatgttggccaggatggtcttgatctcttgaccttgtgatctgcctgccttggcttcccaaactgctgggattacaggcgtgagccactgtaccctgccagaacaaaccatttttaaagctactgcagagtaagaaatgggtgccaggaattggaaaggtgtttgagaaaatgattttcatattcgtaaaatgatttttatacatatagcaatcctcttattcagttataaacatgttttatattattttttcaagtgccctgaatatattaaatcaatgtaattctagcttagctgggctattggtgtcttttgaagcatgttcttatatcataggatttttgcaagggataacacggtaatgtacgtgagtgattgaaacaatacctggtataaatgaagtgttcaataaatgttattaaaaataactatcgtcatcactgtgagcaatatgtatgtcctggcttatcagataaaccaattaccagcttttaaaatatatgtagatggattttcccttagtgaagacactattaaattttttttaaagagacttaagtggggacttgtctaacacataataaactatttcatagagctgggatggaagaaaagataaagaagcagaaaaaagtaacagattgtgctgctgagagctaatagtgacaacactggtttttcgtgtttcaaagaatgctcgatgggatctgaaatctttagaaatagagcactcattgttttattggtaaagtttcttattttaattagtataaaatagattcagcaaattgcacaaatcacagatgtgcagtttaatgaaatttcacaagataagattgtgtaaccaagacccatatcaaaatatcaagcataccagcaccccagaaatttcctgactccatccctacacttaactttctcccagaatgaatcaccattttaactggtagctcatgttttagttttgttttcttttttaatctcatgcatgtagaatcttttgcatcaggcatcttttctcaacattatgtttctgtaatttacttattttatctttatcatagactttgtatttccattgttgtataatattccattatatgaaaataattacattatatattattgacattgagttatttcttatttttcaatcttctatttccatattgagatattattttatatttagtatattgtcagtaattatatattcttcatgttttctttgtgagtaatcaaatatttcttatatttttcctattagccagtcacacattattttgctattcaattagcatctttcagtgtagaacatgcattcataactatgaatcagtgctcttaccacttggtgaacaatgtaagatctttacaaaactgacttcattggcttttatgccactttcaagatatgtttttattatacatatattttaatccccatatggcaatattgttatttaaaatcaatattttagattcatctatacaataccattcttttgctctttagttcctaattttagagcttccagcttggatcatacttcttgtttaaaaagtactcctcatatttaattttatgttcatctaatggtgacaaattgtcttaatatttgtttttctgaaaatatctttattccacctgcattttaagaaaatgttgctcaatacaggataacgggtcaacatttttgtggggacaggcacatcatgttctcattaagtgagaacattgtggctgccatattttctgtcaaaaagtcatatattttctgtcaaaacatggctgctatattttctgtcaaaaagtcaaatagcaaacattatttttcctttgagaaaagtttgtcctttgttctaggtgcttttaaaagtttgtctttcttttcagcagttttcttttgctatgactgtatatgatttcgttgttattctgttgtttgctaaagtttgaatctttgggttgatatattgctctgacctattctttttaattcgtaattctaagaatcaaactacatgtattttaggctgttctagaatgttctatgtatattttctgtattttctctgagttttagtctgatattttacctatcttctagcagactcatcctttcttctcttctgtctaacctactacagttagttgagtgcttaattttaattacagtatatgttttcagctttggaattttcatttctagctttctgaatatgttaatatcgttaccttaaatactctatctgaagactccaacgcctagatcacctcagaatctgcctctattttctgtgtttcttgtcctattttacaggatgcctcaagattttaattggatgtcagctattgtgtgtgaacaattatggagaattttggataatactttatttctgcagaaagtattaactttttcatggcagactaagttttagcatctgtaatagtgtgtctgtttctaggagtgcctatcctcctgattcgtagacctcaaggggtctcaactaaaagcctgacctaacccccaattattatctcacagcatcatgcatccgctagcagctgcactgctatttggcctggaactgctcctgtatgcctgctgtcccactgcccacctttggcattagcaaatgtctatgcgtaatattaatgcagaatgtgagactcatatcttagggtccctttctccgggatctcggcacctcaagcccttgctgccttggtagccctgacctccagtctttgtatttgtaatactgctgaaatacaattacgatgctgctattgtaatgctgttcaagattctgagtcaccccttttattttgccacttagccccttgactgcttacggatgaggctgtatagaaaagtggcagagcctagctgactcaccctagtgtaccttctttcagcctcttggatcttcaaagcaatctttctgcatggattgcttcccgaagctttctaatagcttatgaaaaagtttttttctagcttttgtagttgttctcagtggaaggatttgattgttataaatattcttatcttaccagactttgatccatgagtaagattaattttgatctatcagaatatacttacgctctcagggcagtacctgttacacggacagctgagatgtgtgggtgagtagtaagtaagaagcataacattgagtcaagtcaaagaaagagcacaagtttattgaaatatgtaagaatgttgaatcccaaatatttaaaagggagctactgtatgaattcagtttactcaaagatggcatagtgctcaaggaaaacgatgtgaggtgagaaaaacatggtctcatggtgttagagaccatgagaaatttcagtgtggtagcatcacttgatttacagatatttacagatattagatctgtagatcttattcatcctacataactgaaattttgtttgcttcgaccaacatctctccattttccccactcccccagcaaccaccatttcgtaatctacttttatgagttcaacttttctagattccacatatacatgagatcatgcagtatttctctgtgtccagcttgtgtcacttagcttaatgtctttcaggttcatccatgttagtagccggagtattcttatgtttcttagagtagattaatttcagcgtgcttattgatctgagctttttggtcccttcttcaataagttgctaaggcatttctggagtctatatcatttaacatcagccatttattttttcccctaattcttcaatgaccattctatccattaagaccaagtacaccagctccagaagctcttgccaattagtcgaatcctgaatcttgagaatacatcctatcagccaacctctccctaatcagttttatagtctgtctgccttcctctgcagagcacactcaaggttcatttatataaatgttcttcccgggctggccgtggtggctcacgcctgtaatcccagcactttgggaggctgaggctggtggatcgcctgaggccaggagttcaagaccagcctgaccaataaggtgtaaccctgtctctactaaaaatacaaaaactagccgggcatggtggcatgtgcctgtagtcccagctacttgggaggctgaggcaggagaattgcttgaacctgggaggtggaggttacagtgagccaagattgcaccactgcattccagcctgggtgacagagtgaaactccatctcaaaaaaaaaagttcatcccattgctagtagtgcctattaaagaccctgcagctccacctttatactattctccttgcaaagcagaactcatgcttcccagttggtccatgccaacagtggatcttattataggtccattgccatgaaagaggcagagtgggcagaccttgaggataataagtgttgtctttcaaggcatgagctctccacttcaacttcatgcaagtggatagttgctgtcttctagtaagaagcaatgagataacagcccatgcagaccatgaggttcagagatctgcatggactgatgatgcatgtacctgtatgcagccacctggatagccctttcccaaatttcagagtcttgtttcttaccttcagggctctggctttgatgcactagatttcactggactctggctaaagtcttctgaaagttctttttctcttacgtgtaagtccttgacctggtcttcagcttagactcctccttagttgcagaaaccagggcctcattaaatactgacatgaaggccttttgattttcacatcatgccataaattggtaattagttgacctgaacctgacatttttctcttttcaatacattgataggatttagcaacatctaacaaatttcacagttcttttaattagttactcctacctccatacctcctaaatgatcaaaatattgcacaagccagtgaaataaactcattacatgtaaacataaatcacattttcattagaaaactatattttctagtaaaaaagtatgaaaagagaggcactgatttatgttttttttttttgcaaatatctttaatgtctaacttaattgaaaatctgtattcttataccagcttctgtagtcaatctgttgtgaaacattttggtagaaatatatgaagaaaattactctgatatagtattggaaaggaaagaataattttaatagccctttgagaaagctgtgatattttttgataccacaccaatactgaacaaggagaaaattcttaaagattatttgcaatgtaaagtctgaaactctatttatgaatgttttctctggtatattagaatcctgtagcctatcctgcacttggaatatgtcttttactcttgcataattgaataacatcatgcgttgatcatttgaaaaatattgtttcactgagttatgcagatctttcaatattaacatatttcatttcataatataaaacattctatttgctattgtcatcaaatcaacaagcattctaactatcatgaagcttcaagctcacagtaactaatataaagttttcaaaactccaattttcttatgaaagcacagattttgtcactggaagcaaataatgtcagttgaattccttgaactgacaagctcactttgtaagaaaatttctgccaaatacccatctgaataaccatagttaccataggattttttttttcagtttaaaaaaaaaaaagtgttctctgaagaaaggagcttgttcagctttccactcaaacaactgcataacaatacaaccgccatacttcagtaggtagcatactagcttatgaatgtatcccattccattccaataatttaaaatgtgtatactgaggccaggtgcagtggctcacacctgtaatcccagcactttgggaggccgaggtgggtggatcatgaggccaggagatcgagatcatcctggctaacacgatgaaaccccgtctctactaaaaatacaaaaaattagccgggcgtggtggcaggcgcctgtagtcccagctactcaggaggctgaggcaggagaatggcgtgaacccggggggcagagcttgcagtgagccgagatcatgccactgcactccagcctgggtgacagagagagactccatctcaaaaaaaaaaaaaaaattacagaactatgagtttggggtacagttcatgaccatcactcagattcactgcagatgacatcaggggactcagtagagaagaaagacatgagcccattgctgaaatggtggagagagatgagcatgtgtcctggagcatggctctttataataatcaagtaaatggttaaaggatcttttagtggacactatgtatttaacaagaggaaagatgattgggttaggaaagttgagcagttatttagaaatgagcacacgagctggggagacctctccagagaaggcagtggagaatcaaagaatagagggttgtacaggagatgctttttgggaatggctgtttcaggtatcaattaaagtggaaaggtagggttgtttttgtaaaaaagatccaagacaatggaggatttgcccacattagaacaggatgcaaactacaggacggcagaatgttacagaaacgaaaaatgtgtttcagagtgattggagttagcattctggacgtatttcttacagagttgactagcactattcattttccaccctccaacagttgctgaatgattttgttttaagaaaaaataaacaaaaagtacttagcctcaaggaaaataacttagggattttctgcatcttgaaatgcatgcttgtttggaacaaacagccgataaaccaattctcttaattatacacaaactgcctcacaattatgtactaaccgaatcctgagtggacttggtagacacttgctgcttatgaaagaaacactacgcagaggcaccgctcctcacttttcttaaagaaaaaaaatgcatgactttaaaaaaagagtttgaaaattctcagtgatcttgttccctcatttatttttccacaagctgtgtctaaattcaggcaaagttatcaacttaccatttaatgatatggtcacttaaacaaagcataaccttaacagaccttcaattcaagcttgcattacacatagtttccaaaagctgtttttttttatgtcctgaatttactgatattgatattttgcatgctttagactccaatgcagtattacaagatgacctatgctgttattgggacacttttcacaggttatcttttctaagatccatttgcatcagataatttcagccccaaacttataacagtttctcattttttttaacctgggcttgtaatatctaccataactcaccttggaagacatacttgaaatttccatttctttttttctttcttttttcttttcttttctttttttttttttttgagacagagtctcactctgttgcccaggctggagtgcagtggcatgatctcagctcactgcaacctctgcctcccaggttcaagcgatattcgtgcctcagcctcctgagtagctggaattacaggagtgcaccaccatgtctggctaatttttctatttttagtagagactgggttctatgatgaaccttttttatttaatcctcactagcatcctcagcttagtttcttcactgccctgtgaactctcactgcatctctgtattcacacttttcttcactcttgataacgtcttgactttaattctctccctcatcaaattttcattttctcctcttctccttgacatatttcacccaaaaattttcataatagttttattgattcttcatggtctaactatgtcactcaattgcattcatttttatatcatatattttaaaatttgcctatttttttgagacggagttttcttgttgcccaggctggagtgcaatggtgcgatctctgctcaccgcaaactctgcctcccaggttcaagcgattctcctgcctcaggctcctgagtagctggaattacagacatgcgccaacataacttagctaattttgtatttttttgtttttagtagaaacggggtttctccatgttggtcaggctggtctcaaacccctgacctcagatgatccgcccacctcggcttcccaaattgttgggattacaggcatgagccactgcgcctggccaaaacttgcctcctaaactacgcaacaaccaggctacctaatggagtctctgtctatctcttgttgcatttcttctctctggtcaccaaccctgtgagagattgggtttctatcagttgtagtgtactaagtcttccattccccagacacagcttcctgcattcaggtgaacccgtgaccaagaccaggccagtcagattctgccttctagaaatgttgaattgttactgagataggctagttggtctgtgatggttgctggcatgcacaagaagcaaacaaggaagctgcaagggtagccatgtttagccatgtgagttctgaaacaggggaagctgattttcagaagaaaagaaaatgaggcaaagatgagcaggaattagagactggcattgccaagatgtgggtgttttttttccgtttttgtgttaggcctttttgaactaaactgcttttcctccccttgtgtttcatgcagcacagaagtgtttgtacttttgaaaccagcttttgtgacttgtcaacaataatgtcttagaataaaagagattgtgtcctttagggtatacataacttttgtcctagtagttttttgtttattgttgctatttttcatcatgtaaactagatgccccttaaagatacttacagtctggaaaggaaaaaagtggtcctttttgttatgaagatattattctgaatatggaaagtacaaaagcgttggagtcagacaaaccgcaactggaatttccaattcacttcttactagctgtgagttcttagggaggtcacttattcctttgagccatcaattcctctaccttatttatgctgtatcctcaatttttagtacattttccatcaaatagcctagtaggcaatcaaagataaagacatttgatttgccagaggcattttgggcacagataagcacactttaactttcttgcatatttttccaatttggtaaaaatattaacaataatcggagggagtaccacaggcttctgtgaatgagagcttagcaaatgaccatgaaatggataaatggtatgaaaacccacaaatagaatagaagtgaatgtaaactgtgaattggcgcttcttttgtcaggacatcttcttgttagaaaaaaattaccaatatatttgagtgtagtgtcctacttgggaaatgatatcttgaatgaccataagtcttgcaaggtgatttttaacacatttctcatttgcagttttttaaatatttgtaagttaaccttagcaaccaagttccatttgataagaatccatacataaacactgactttcttttattttctatgaaattcattctcatagaatggtgatatgttttctctgaaagcattttcctctgcttgtagtggcatgctcattagtgtgattatgttattaatgtcccctccaggctctttccctagacggtaagctctgtgaaagcagcaagtattccagtgcatattcagcattttaatgttagtccttgcaagagtacctgaaacataataagcattcaagatataatagttgttgaatgaataaatgaataaattatgttgaatttagggggtgacattatatattttggcccccttgaaaatgcatgaagttcagagatatgtacataatatattcagatttgtcaaactgctcatgcctacctagaacaaagtccttgcttcttaaaggtggctacgaatgattaaaatttccgttctgggaaaaattattagctttgtttcatacatctgttaaacaaacctgtataaaatggtgcatgcatttcaacttataaaatcttccttaaagccatattttagtatgtgctaggtggtattaacttcttgcaagttttacctcatatacgcctaaattcatggctaaaaggaatatatagacagcatctgtctcacatatttattatcattttaatatcaagagaggatactgagtgatgatatattacattacagtttcaatgaattaaaatactttaaacctgtagtgagaaaagaatgacaaaaaaaagtgtctaggaagagatggaaacagtaataaattagcgtaaacaaagatatagaaaaatgtagttgaggccaaaaatatggatgggagttaagccattattttcaatggtctacagccaaaaggctatataaaacagactcccagattggcagatttatgggagagtcatcaaaactagtgatcataaacttcttagaataaaaaaaaaatctaaacaccgtttactttgattagattcaggattgagctgagctaaatctcagaggggaagaagaattttgaagtccagaaaacatctccatattattcacaaactgtaccagcctttctgggaaagacaactaatgagacaaatcattttatcacccacttccttaaaatgccagtaactgagagtcgagaggtatgaagtatgaatttccgaccaggctcattgtttcagttctgtctgcattatcaccaccttggactggactaccttgatctcttgctgaaatgactgtgctagctttcaacaaattccctgcttctgctcagaagctctgttctcaacacagcagttggagggatgcttttaaaccacactcaaatcatgtacttcctcttctgaaatcttgtgactgtttcctactttactcacagtaaaaccagagtcctctcaatagactgagtgctctatgatctcatcctctatgcattctttgattccttccctttcatcttctttttctcccatagctccagacatgttgacctcaaagctttgcctcaaacatctgaagcatgttttcaacttacatcctaatactggctgttttctccacctggaactctctactcctagatatcttcattgctacccctttgaccttcttgaatttgttttgctcaaatgtcaccttttcaaagagacaactgctgttaactgctgctaaaattcaactttcctcttgactgtcccccaggaattctatattatcccgctttctctgctcatctctacttatcaccctctaacatgctaaataatttacttgttgcataatatatgttttgtaattgcctttcagcccccatcagaatctaagttcgtcgattacagggaataaatacatttgttcactgatatattccaagtacttgaaacaatgtttgacacaggatatggcccataaatatttgataaatgcttgagttgcctcattgaatcctcataagagttctgcagaaatttctaatattatcgtattatttatggtaaaggcactgtggttagatttatcgacttttcattgatttttaaaattaatgttgtataaatttcacatatattattccaaattgtgtatagaatgcagctgttataagaactagattacagctttaaaaacttttaaaagcggggtagctttttaaaacaattttttgcataaatttgatatccctgaagctaacaggaagcatttttattaaaatttttgctttgaaactcataatactgtgatacaaaattcctttttgaaaatgttataatcaatcttccatttctatttacatctgagaattccaattcatcacttccactgaagactgcagtcatttgctcctaattgggcatcttgtgcactctatctcaattgcatggcaaagctgcttgaagctcctcattacagaggcagaaggctggcaataaacatcttctgcagcctccatttctgccagctttgctcctcttctagctaatggtattctaggctcctaattgtctcacatcaaaaatcccaaagtacttaagtgtcctcactagaaaaacaaaagcaggcacaatgtcaaacttgaagccccagcacatctttaaaagtgaggagagctgcctggctctgcagccaggcccagggagatgaagaggaaacagcttagcaatttgcatcacactcctgggaggctattggtgccatctgagcagaggacctgatttttccccttcatttcctttcctccccttcctccattctctattgtatgtgaaggttttgtggcttgatgaaagatcagaaaaggtcagggaattctcataaggtgccgccacatatgggaatcttcacatatatacatatcgtttaaatgtatttccaaatcaacaaacttttcagaaatgatgcatgcagcttctcctagcaagaacaattcttgtgagatctgagtgtcactacggtggtttagaataagttctagtccagacaattatttttatttattgatcatagcagtaaagagcccaggttcttaccccgggctccaatcaatcctgtttttgtttcgttttgtttcaatttaaataagttaatgtggagctgataacttacatgtatcagtggctggaacatgtaaaatacccagtaaacatgagctgttactagcattaatattattatcactatcgaacactaattatatgctaggaattatgataaatcttacttaaccctttaatcgaacccattatgtagatattatttcttatcaatttcatagttgagagaattgaggcttaacttattaggtagtttgcccatggtcactctgcataaggatgctggtcacattgctatagtgtcatgtttctattatacaaaccactggcaagatttggtccataaatgcattttgtttggttcacaagtaaaaatatctgcatttttaatactttgaattagatgatgcatttttcagttagatgtcatcatgttcaccgcctattacgtaccaggtgtctttagtcatttttgtttacttagcttgcctctattttaagcaaatatctattgagggcctatgtgccagacactgtcgcgaacgtgggacttatagttctgaacacaatagaaaaagtacttactctcagggagtttgcagcttctgctgcagagcattcagcatgtcacagtggagatatatgatagcaagtatttcacaagtaaaggcaatactaaatatgttacctttgcaatataaaattaaaactggacttatctttgagaggataactgaaagtacaatgactgcctacggtgtacacttaaactgaaggtacagttgactgcttaagggctacaattgggaagcatcagaaacaatttttgcccttaaatagcttattgacttacttatactacacctcaaaaactcatttcttctggtagatgcaatgtctttggtaatgcatgctaaaatatgcatttctaaataaagttaatattgatgtagtaagcatcttgtacatagttattatatatggataagtacacagatagtgaatttaaagaattaatcatggcacaattatcatatgtcaatcagattagcaaaacaagtacattttggcagagaataaaatgggaagatttttggaaggcagagcagctgggaacacttgatggaataatcaacttggaccccatccccagctgaagaagtgagaactctagcaggcatgtttcatgttaattgtttctattctcccttttatatgaataacactggtggtgactcaagctttaggttttaagtaggattgtgtccaaattaacatcacccattgtattagtcagggttttggagaaaaccagaaccaataggagataaagatagatatacaggacaaagacatagataaaaatgatatagatatagatgatacagactcagacataagaggaaattttttataggaattggctcatgtggttatggaacttgacaaatcgcatgatttgctgtacaaaagttggagatccaagaaagctggtggtgtaaatgcagtctgagtactacggcctgataattggggtccaatgttgtaaatcccagtcagagtcagaaggcctgatccatgtttgaaggcctgagaaccaggagctctgacatccaaaggctgaataagatggatgtctcagctcaaacagagagggtaaattagccctttgtattagtctaataaagacgtacccgagactgggtactttatcaaagaaagaggtttaattgactcacaggtcagcaggtctggggaagcctcaggaaattacaatcatggcagaaggtgaagatatcacatccttcttcttacggtggcagcaaggagcagggcagagtgaaggtgggggggtgggggtggtagggaagccccttataaagccatctgatctcgtgagaactcactcactattatgagaacaggatggggaaactgcctccatgattcaattatctccacctgttccctcctaggatacgtggggattatggaaactacaattcaaaatgagatttgggtggggatacagccaaaccatatcaaccttcctccacctttgctttctatttaggccctcaaagaattggatggtgcccactcacattgctgagggatatctgctttactcagttggccaattcaaatgctagtcttttcgggaaacaccttcacatacacacccaggaataatgtttaccggctatctggccatcccttaaccatcacacagatgataattgttgaatggattttgtgggctctccttgttgggccatgaatcattgggaaaacaacaaggctggatgctgaggagtgaatcaggtaatggactggatagtttcctatagcacctccagatctactcttccccattgctcgctttgtttgtgcctgaggggacgacttttgcagctttcatcatgaagtcccttttgccctctgacttccagttggattcaggccatgggagaatcagctggtgcccagagggtgagaggaaagtaaactcagctcttaattttcttggttgtgtcactgccaagctgtggtttatcagtgattggttttctcttgcaaaggtcatagctcttctcagtcctatcccacagttttctctgactttgcataaccatttcctcatcacactcctttcaacctatgctggtaacagctttccactgtggtcagctccagtgcttcacctccctgtgagtttaactgtgctgtatatatttttaaatgttccgtttaaaaaaattctccgcaatttactcatttattttttgccttgaccctgactgactattccctattatgaatagaaaatattagctattcttgatattgtctatgcctggtaatagccaatggagcaaattcactttgccctttaagtatattatttacctgcatagtttttttgttttgttctgttgtgagacccagtctcactcactctgtcatccatgatggagtgcagtgatttgaccttggctcactgcaacctccgcctcccaggttcaagggcttctcctgcctcagcctcccatgtagctggaattacaggggtatgatttttgtacttttagtagagacgagattttaccatgttggccaggctggtctcaaattcctgacctccatttctctccacattttgtaattacttgatgggttcatcctgcccactgcacagacaaaaccaatttaccaagactgtggtattacagtaaagaaagaatttaattaatgcaaggcagctaatcggaaggactggagttatcattcaaatcaggctccctgggaactctgaggctagggtttttatggataatttggtgggcagaggtctaaggaatgggtaatcttgactggttggggatgaagtcacagaaaggagaaaatagtcctcgtgtgctgagtccacctctgggtgggaaccacaggaccagttgagtcatgagttagaggtccaggtggggtcagttgccagaatgcaaaagtctaaaaaaatctcaaaagaccaattttaggttctacaatagtgatgttatctataggagcaattggggaagtcacaagtcttgtgacttctggccatatggctcctgagcaagaaaggattgtagaaaggcaaactaggggatgatggcacatttagctatacctacatcataacagaatttgggctcctctcataatactaatctcctggcttctcattagttttacaaatgcagtttcaatccagaaagaaggaggggatcagttttagggagggactatgatcatgcttgctttaaagttaaactataaactaaattcctcccatggttagcctggtttaggtccaggaatgagagaggacagcgagcctgtgaggctagaagcaagatggagtcagccatgccagacctctctccctgtcatcatcttcgggaaggcggtttcaacctttgtttatgtatttcctcatttcactctctcaacagctaatgaaaattgctcaattagtctttccattttccaattgaataaacagaggcaagttaaaataatctgcccaaagttaaccaaataggagcaaaaagttgaacctaagaagttttatgtcaagaccaatgaacgtctagattacaaaattaaataaatttaaaaaaaaaaaagaagattttttttggctaaatctactacattatggtttttagaagtcttcatgctggggaaggaaataactctaaaaacaaaccagagaaaatttaagaaccagggccagcaaatggctatctgaaagaactagaaagaaacaggattctacatttataagataaatgaaaagagggtccaccaccctgtatacataggaagatgtattcatgcatttgcatgaataagctaaaaggtcatcaagggccaaaaacttctggaacaaaggcatctctgaattgaaacattattgcttacaaagtatccactttccaaaaagaaggattcaaattatccccagcttaaaattttatttgagtggcatcttcagtttttctctctttgaaaatatcctccttaacatcgcctaaatgttttcttctctctgcctgatggaactaaaagaaaattgagaaggaaatataaatgtttccagatttaattcaaatttaagtcatcatttatttcttctatttttagtcacaaattataatagaaaatacattttactcaattcctcataaaaaaaatggaagtattctgatgaagtatcaggactcttgaaataaggtatcataatatcagaatgtccaaagaaatgaaactttctatttaataggaattaagaaggaacaattctgctttctttatgtataaatactctaaattatttacaaattaacttaccttcataattttgagtataataagcataaacaaatctgttttttatttttgaaaaaaccagttagtgcttttggaaaacttcagtttgtattctcattgttataggcaaaagcacagatattaataccttaaagacagaagtaaacccttaaatcacctgctgagtatcactggagatttttttatttgttttcttatgcgtatattaaatgactaagcataatattttattattaaaatgtacattatacattcattgtatcagttaataaatagagtaaaagtaaatcataaatttattctgtggtttagtatttattattttaatttgcatgttaccttgtatggaatgataaatactatagaatctatcatttttctcttttgtaaaggcttccagttaagttagcatattagaattttctctgtagtttctgacacaattctctgtcagcatggtttagcaatcattagctgcaattaacataaaataacttgagtcagcttgagtaaaaatagataaatgggttgatcaaataacacagtggtagagttagcagtgttgggcctcagcaaaggacataatactagaaatatctcaagactctgtgtcttcaatctgttctttctcggagtcggcttctctctctctcattctaactctttctctgtctttctcccccaaaccaggtttgctttttctcctcttgctccttccttattataattccagctctctttcctaatgctatctcctagttgcaattccaaattccatgcaaagagaaatggactggcccagctagggtaagaggttgcaaatggtccaatcaattacagccaggtcacataggccagcatcatcaatgaagggtcacttcgtaggaaaaagggacatttacagagaaaagaaactttagagtaacccaggaagacaagcatctttatgccctcccattcgttcatggtttctgaactcaaccaactgtttatttaaatagtgtcctgctttaaatatgttttactgcctgtcatttaaagttgtttttgaaaatacatgggctataaacttattaaaggcgaaggtcagatgggatcatctcagatttgaagctagaaaacttgagaacaagacctaaaatggaagacagtgagacaggcgaacacaattttactgttgctgacttaatggtctctccttaaactcattatcttcttcactctccctgtccctgctcacccagccatgaatattaaaattatatttcattataaaattctatattttatgctaaagaatattccaataatttctaaaagtagaagtgaaaaaaaaagctatccatagctttccatcaaaacaagcaacaaagctgtcatatcttccatctagtggaacatctaatggcagtcaagttagtcaatcccatttctaggtatatacccaaagggaaataaatcattgtaccaaaaagacacctgcactcctttgtttattgcatcactattcacaatagcaaagacatggaatcaaccgagttagccatcaacagtggaccagataaagaaaatgtagtacatatacaccatggaatactatgcagtcctgaaaaagagcaaaatcatgtcctttgcagcaatatgaatgcagctggaggtcattatcctaagcaaattaaagcagaaaaagaaaatcaaatactgtatgttctcatattatactgtatgttctcacttataagtggaagctaaacattgggtacacaaagacacagagatgagaataataaactctggggatttttaaagtggggaggcagggagtggagaaagggttgaaaaactacctgtttggtgtaatgttcacaacttggaggatgggatcattgttaagtccaaacctcagcatcatgcaatatacccatataacaaacctgcacatataccccctgaatctaaaataaaataaaataaacaaaactaaaataaaaaaaaaaaacagtcgatccaggcattccttgctggagtcagagctgccgtagctgagctaatctagtaccagacaaggtcctaatctggtattgttttctctgtagggttccattccctctttaaatgtggctacaggagtctcttctattgtcaattcttagcttcctctgcagatttttgttcctcctgtctttccaagattatttgatttcatatttcctttgataggattgcatacagtagttaagtttcagccctgcatgtggtgtcaccattgagacaatttagttctctaagaggaggcaggaggatatttacattttgggtgttgtatttcatgctaatttccagatagttctaatatttatttattatttgtatttgttttaatgcaatttgtgcagacttttccaattcttcattctattacactaatcagattctatacatgctacctctgttttcacatctgtaaaatttaaacataaacctcagcatctctcccccaatattctccaaatagttcatttatataaagcgtagtaaggtagaacttgacaaatattttccttggccgatgaaggaaaggacttacattatacttcctgtttctactgcttcaaaattttccatcacattagtttttctcattctctttgccattcaggagttcttttttttccttcgacctcaccccaggcaatagccaggttatcggttgtcctctttctagcaattattcctatctccatctctttcgcctttcctgttcagagcaatttaattagatttattgtaaatatactttcccagaacacaaccctttagttaccgttacttagaaaaaaatggagaaaaataaatttttaaaaaattgtattacctatggctttcgggaactctatttcaatggctgattgatattaatcatattgagttattatggtttatttaaatcccatattacctctcatttaaaatggtttccttttgttccctacaatgattaatgctaaaataaacatattttgcataaagtcttctctgtagcttttgatttttttgtcttatcagaaatgtatgtgttggatcaaagctgtgagactttttaatgaaaaaaatgccaataatatttcacctacttatgatttcatcagaaaatgcatgaaagtgtctactttatcacacctagtcatataggggtattatgatttttcaaaaaagtgttaaacaataaattaatatgtctttaaaaaatttgcacatctacttttaacaagtcatgttggataattgtttactagttatatttctgaattgtgaattttataattttatatttatgttttgaataaataataagggattgtattatgctgtgataagcagtaaccactaaatatcagtgccttaactcgttaacatttaattttcatttatgtaaacccatgtgagatctaactgctctcttgggcacttccttcaggtaggagtacagaactgcctgtctccaactacttgcagctctgtcacttggaacacatggcttccagggttgctatgtcaggggaagagagggtctcatgctgacttctcaaggcctcagcctggagggaacgcacctgtcttcctcttgcaatccattggtcagaactagtcatgtggttcacctaaatccaaaaccacagggagagaggggaactgggtattcctgagcaacagcaaaccctgccacacacatattcttcactgtttactaatagccaatttacagtgtaacagctctttgtataaaaacagtttctgactctcctttgctacagactttttttgtttgctatttgccttttaatgtgtcttctattctgaatttgcaaagagagctttctgttacaagtactgaaaacacccaggaagattcaagaagtgtcattatattatttgtgttaaaaatacgtcagagaaaggcatgtcaatcttcaagtaattgtttctctaaagaactctatgagttaagtcctgaagcaggtaacttagagagcgtgaaggaagataagtgcctacaatgaacactattagatcaactggtttacataagaaatgggctacttgacttgaaatgagaggttcaggtacttattttttctagtggttctagaacttgtcttgctttcattatggttaacatttttcccagaagatcatttggattctgtcttctcggaagaagcgcacccacacaagtgaattaaaatctaagctaaattcagctttgttcaaatgtgcctccacctagtatctctcctctgttccccatcctccattccacccacagccctaggaagaaaggaagacagtatgaatttattcatgcttaaaactaaattgagctataaaatctgtttatttccttgacatctctactaactactaagactatgagggttgcatttaaacatgaacatttattaaaactctttaatagccatgtctctgtgatccaccccaagtgaggcaaaaattttgatgtaaactttatttttgtagcctacagacaaactttgctatttcctcatgcttttcctttattcctctttcctagtttcttgcaacaaatgtttcattattttaacagttgtcatcttcctgcaaagttcattatgcaggtcaaaatcacatgccattttttaatgaaaacagcaattcagcttagcccagtgcatttcttctgggttatttgactgcagatttttgacctagaaatgttttaattaatttgaattttgattgaactctttgtttctgaaattgcttttctgtacttctttatgtaatctttcccttgatttccattacctttgctgtttcatttgcttttcattttatttttatttgattttatactgtgttaaagcaatcaaggataaaacatctctacccttcttccaaatgcagcttatcactaattcagttttgctaagaaatgattgttaaataggaaaaaaggaataaaatctcaacaaggtaatgactcataccagttagtacaaacttttaaccagcagagtaagctgattaaaatccgagttgttatctactagtaggaggtgtaggtaggaagatggcagtttccctaatgaaatggaatttattaagtacctgaatattatagagtctgttctattgaaacatgctgtatacattcataacattaaaagaaaaatgccggccgggtgcggtggctcatgccagtagtcccagctacttgggaggctgaggcaggagaatggcgtgaacccgggaggtgtagcttgcagtgagctgagatcgtgccactgcactccagcctaggcgacagagccagactccatctcaaaaaaaaaaaaaaaaaaaaaaaaaaaaaaaaaaaatgctgggcacggtgcctcacgcctgtaatcccagccctctgggaggccgaggcgggtggatcacgaggtcaggagatcgagaccatcctggctaacatggtgaaaccccgtccctactaaaaatacaaaaaattagccgggcttggtggcgggcgcctgtagtcccagctactcgagaggctgaggcaggagaatcgtgtgaacctgggaggcggagcttgcagtgagcagagatcgcgccactacactccagcctgggcgacaaagcgagactccatctcaaaaaaaaaaaaaaaaaaaaaaaaaaagcctgacgctgttataactgatgaaaatcaaagctacatttcaagagcctaacaagacaaacagaagtgggatggaagattgtcaggtacattcatttcagcctgcagaaatgggatccttgccctgtaaagcaagttatgagtatgcatgagaggttttattacaaattgctctttttctaggggtgtaaaaacgctgaagaatgtagcagattaggtgatcctcattgtcattaattcagtagtaataggtaaagcatttattgtgaaggacatcaccagatagcataagtgcgacctttatctaaattggataacaccattctaaaaagatagatcgtggacttccttgaagtttatgagagtattttacatagattagttttaggaagctcattaagatctaggatcctagaaggaagagttagaatactgaagtctgtaagcttgccaaattcctaagtgtttttagctctttggtggcagagggaagagagttttgttcacaaacatatggccaaagttgataagatctaattatatgtttgcagctgtttcaaatctgtaaatatctgaagttggtcaacattatcaacacatgacaaaggcagtataaataaaggaaattagctaaaaactgaaacaacaacaacaatcccttttgaagggaggaaattaggagctgagttctctaagtgtgacttaaacaggataaagaacagagcaacaatgctgtacatacataaaaagtttgcacctcattaacaagcattctggaaccaatttgtgtgtataggaagacctctgacaaaaattctcaacagtttgagtacagttttaacaaacacagtatcagctgtattaaaggactactttgattatttatataatacttacaaatacaattaaaggtttgtaacagactcattgagtggtttaaaaaaataaccttaatataaagatttacatctgtcgggtgaaagactatattcagccctaataaaatctggctaaataagcaggaatgatgtattatacatgggattatccattttccaaaacaaaataacaacaaaaaatcatattaagaatacaaaaagttacaaataaggggcaacttgtgtgtttaagtgcaagactatgaatgggaaaagtggagggaataatggatattatgattcaaatattaaaataaattttaaacaggtaaattaaacagttttatttttaattatgagaaaaaatagagaagcatacatttttacattttttctcttcccttaaagtctcctactgaaatctgttatgtctgaaacaaaatatacaatacatttaccaaataaaggtaatcattctgtcatacgaaaataattactgttgtaagttgaatgcctgttattcatttatgtatgtatatatgcatatgtgtgtgtacatgtacacacacccccatacacatcttttccttttaggaggccacaagatgcaacaatttgttatgtacaaaagggagagaagtaatgttctggattgattcagacaactggactgataaatcagttctctgagtatttgtgggtttaccatccatcaaatggaacatgtgttttaccaaggccacttaccacttcatgctaattagatttaattggtgtgtcattgtcaatacaattggctagtgcgatgttctacaaaatgtcaagatggtgaaggtcattgaggatggtatcacagagaatggaatcaccatgggaattgagaaaaacatatttaccaaattggaagctggataccaagtgtttattgtgctaaaagaaaaactgttgataaattaaatgtaacagagtttaactgagcaaaatacagctcaccatcagaataggtacagagagactctggggctgccacatggtccggtaacgcttgtggacagaaaaaggaggtgagacacagaaacagctggattggttacagatcagagtctgccttatttgaaaatggtttgaacagtcagccacctgtgattggctgaaactcagcttctgtgactgactggaacttggctactggttataagaatgggatacagtatatttccacctcccattaggttacagttcactgtgtatggagaaacctttaggccaaatgtaaaatatataaggagacagcattaggctaaactttacaattctcccatttggtcaacttcccaaaattttggtcaaaattgagaaattgaccaaaacttcaggcattgatgtcaatctgtcaccattataaattgacttatttgctttcaaatctcactggaaaatagcagagcagtggattttgtgaggtgggaacaaggaaatgaaacaactaaaaaaactcgattggttaacatcagattacttcaggttacttttctggtaagggttatagcagacaggacttccttattatgctggaatttcctgattttaggagaaaaaagaatggtttgttatgggatctatcttctttcttaaagtttccatttgatgatgtcacatttagcatgaatgactccattttgatttggtctgttctgttggggcctagtgcatgagctcagtccaaagcaatggcctcccgtcattttatttaacaatttcccccttttggtcacgttcttacatagatgagagtgtgaccaaagtttggggctttagtgctattctcagttaccatcattttaagttttcagtctcaacacactattcaaagcttatggtatcttcatgatcatgcatgcatttttagtgacaataacccgtctatttcacttgattaaattagtgttagcccattttactcctacataagccatttggtttctgcaagggttatactgctgaattgaattggaatataatgggaccaccaactctgtctcattaagtcctcgagggtagtgctaatactgcttccaatttactatctcagctgaggagaaaaagcagtttcagggacatccaattgatatttcctactataatgactcttactttatgagttaaggattctaccagcacctgaatatatccatcctaaatatacatctgaggacagaggaaacaactactggatgagtctgctgagccatgtgatccactgatccactgatggaccgaagaccaaatttattctggcctccataagctttcactctaacaaggactgtgctgggtgtttatttcatttcatttcatttcatttcatttcatacagggtctcactctgtctccaaggctggaatgcagtggcatgatcacagttcactgcagcctcaacctcctaggctcaagaaatcctcccacctcagcttcccaactagctgggactacaggtgcatgccaccatgcccaggtactttttttttcttaatagagacgaggtctcactacgttgcccaggctggtcttaaactcctgagctcaagcaatctcccagcttgacctcccaaagttctgtaattacaggcatcagccaccatgcctggccttgtgatggagttttgactcttccattactaaggttagttcaagcctggcaaccaacatccttcacaaaatctaaaatttttcttcattaaggggaccaatcaatgggtgcaatgtttgtgaattcatttgatatggaaacattatagtgaccttccatttattagtttctgattttttttctggtgatataatttatcatcagctgcccacctatctcatcctggaacactgacctattagtcattaccatagatacctttggctcagggtaatgtgattgccactttgtcctcattatcattgtactgatcacatccacctggcctctattagcagtgcagccccaaagaggtcagatttctagcattccctccttccagttctggaaagaagccatccatcccagcaatcaccttaaagataccagggatccctttttcgtgcattctctaatgactcagtaaagagaatgtcctttgggctccccctggggacatagtcacgtggtgaacactctcctctcacctaataaatatattttaacatacccgtactctaaggagctttttgaccccttcttctgccaaagtcacagtggcatatccatctcatttacctttgatctttccaatgtccaagcttcaaggagacattctggcagccagaatatactcctctggctttatatatatatgtatatatatgtgtgtgtgtatatatatatgtatatatgtgtgtgtgtatatacatgtatatatatgtgtgtataaatatatatgtatatatgtatatgtatatatttatatatgtatatgtgtgtatatgtatatacgtatatgtgtgtatacgtatatacgcgtatacgtgtatatacgtatatacgcgtatatgtgtatatacgtatatatgcgtatatatatatgtttggagacggagttttgctcttgttgcccaggctggagtgcaatggcgcaatctcggctcactgcaatctctgcctccagggttcaagcaattctcctgcctcagcctcccaagtaggtgggattacagtcacgtgccaccatgctcggctaattttgtatttttagtagagatgggcttcctccatgttggtcaggctggtctcaaactcctgacctcaggtgatccacccaccttggcctccgaaagcgctgggattataggcgtgagccaccgcacctggctcctctggctatttttgccaggattttaaactaaaagtgtcaggagaatgctttaataagttatctcttgtccagccttacattctgccaatgtctcaatctaacatccttccactcctatgtatgctctcctggaccaggtgagccaggtcctgtcattcttttgttgtatactgcatttccttctagagtagggattgtatctccctcctcagtctatgctaagacctgactctaattattggaggccatggataaaggtgagaaaaggctttatgaccttacatgacctcactctaggtgtggtctttgcattgtctccaggcaaggggaggctgctgtcttctacaaaaggggaaggagctgttttaactgcctgggagagttcgggagaatctgggaaatcatgattctcccactcctagagccaagcgagatttcagagccccactcttttccttacatgaacctgaccttatcagagaggacttggcaagtctgtgttttcattctccttgtagttctattaccctttcagtgaagtcctggactgagttcttaaatttttaatcatagtcagccctaaagtataattgtctacgtgatgttcaattccattagctactgcataacctaacactttactctccaagtgtacctcatattaatctgcttgtggaaggcagggtaactgcttaatccttacaagtaatgacacatcatatgctggttggccaggtctggaaaaatggtttcctaagggaactcaggctggaaggggtgtcatagcctagtcccacctgattgcatgggctgagaattacggaatggtgatatatcaaaagaaggaagaaaccattattggcaggtaaaagagtatagctgtcttccacactgaatgattgagatactattgcacacaagaaaggagtcagagtaaaaagaagttttaagtttcgatgggtctgaccatttaaaaatgttgaagtcattgcgaagacagacaatgctgaagctatcaaggaaataaaaatgaggccaaatagatttatacctaattaaatatgagttgaaatagaaaaaagcataaacaagccttttactaactgaaccaacttaaccacatgaggagagttcataatagaagatttagatgaatatttcctgttataaaaggattttatgtaattattaactgaattcccattaatagttacctaagtttatgggttgaataatgagttggcttgcattctctcatttagcaataaacagtaaacaaaacaaacacacaataaaacaaaacaacagatgtgtttgaacacctgctaaactgtactagctgctgaggaatcaagctcccatattcattctaggaggggaacacagaatattaagaatttaaatagcagttgagataaatgctaaggagaaaaatgaagcagcataaaggaaatagagatgtcagggaggcttctgttttatcagtgaagaatcagggaagtcttcactgctaaagtttcatttaagtgttcaacagatgaagtacatgaaatatataaacccacagatgagacacacacatatatttatccatatatatacctatctatgaacaggtacctaatcttcagggaaaggaagaatgaatcagaataatatattctaaaaagctcaataacacatatataagcttttactatgtccacagaatttgatcagtggaacgtattaaaggcctaaaagcagtcaatatattaaagcaaaatgtaaccagcgttctctgattaaattgtaatgcacttagaccttacaaacaaacaggttacaacttctcctcaagtttttagaaattagaaaacacttgtaaataaatcttggattcctgagaaaattaaatttgcaattacagtatatttagtaattagcagcaatttgaacactgtgggctacagccaaggttagaatttacaacgttaagtaattcaactactcttattaatcacaaaatgaaaataattcaagaaacatttatctaaagaggctagaaagaaaacaagaaaaataaaaaggtaaaagttataggaagaataattcacaaatataaaatcagaaaataatggcttaggcaacatagaaagactacttgctaaggagatcctttatattttaactttttatataccaataatataaaaatataaaattctagggaaaaatgatgataaaactgctaataaaaatatatttttggccaggtgcagtggctggtgcctgtaatcccagcacttcggaaagccaaggcaggcggatcacttgagcccagaagtttgagaccagcctggccaatgtggtgaaaccccacctttaccaaaaaatacaaaaaattagccaggcatggtggcatgcacctgtaatctcagctactcaggaggctgaggcaggagaatcacttgaaccagggaggcagaggctgcagtgagccgagattgcacctctgcactccagcctgggtgacagagcgagattccgtctcaataaataaataaataaataaaatatattattaatatatactgaagttaccatgcatgactctatttgaaaatgtgatttgcccaggggtgttgtacagaaaaatataaattacataattgtctcatttaacatattcaatgatattaagcatgaacaatgaaaaggtaacgggaaaaattaatagaggaatgaaaggcacctacctttcctctaaatgaattagcctcatattaataatttacaatgaagtaatatgaagaccaggaaatatataacgtgtacactatttaaaaccaccatggtttgagaatcagacaatattcaaatcctaatctctgaaagataggcttttcacaaacatttcgatgcgatgcattttaaatgttcccttcaattactttcatctctcttccaccagtttctttccctcccctataccataatcacccatgtccatataaaggatgaaaaatgacatggagacccttcattatatgaaaggaactgactcaggaaaggaagcagcattcacccttcattatgagggatcttgtcttgtctttactattgattcaataactatttaagtgcttgtaaaggacagactctgttctcagtgctagagcactccccaaagagaactggcttgaaaaatgtttaaggcgcatatgctacaaagagacattctattctcttgttcttaaattatctgtagaacatgtaagacctgtgacttggacaatgaatcacagcttaaaaactaaaagataacggtcaaggtcacacctatgttactagaaagtatattaatcagagtgctggtgggagagagttaatacatgcaaattgggtaattagaggaaattaaaaatgggggagtttaaaaattaaaaacagaacaatcatgtgattcagcgatcccacgactaggtgcgtatccagaggaaaagaaatcagtcagtataagaaatatctgctgggtgcggtggctcactcctgtaatcccagcactttgggaggctgaggcgggcggatcatgaggtcgggagatcgagaccatcctggtcaacatggtgaaaccctgtctttactaaaaatacaaaaattagccaggcgtggtggtgggcacctgtagtcccagctacttgggaggctgaggcaggagaatggagtgaacccgggaggcggaggttgcagtgagccgagatcgtgccacggcactccaacctggacaacagagcgagactctgtctcaaaaaaaaaaaaaaagaaaggaagaaagaaatatctgcattgcactctcacggtcattgcagcattgttcacaagagtcaagatatggaatcaatctaagtgctcatcaacaagccagataaacagtagagagtaaatgtggagacacaaacaggttatcccaaatagaaagaattctggagatttggtgattttccttaagatgtggcacctgctctatgactggtgtattctggaatgtgctgtaagactttttctaattttgcaaaaactaaaatagcataaataatatactaatatgttatattagtataatataaataataatataacatactcaaatgtcataattctgtggaagaacaggcatgccctcccgttgcttgaccacatgatatggttatgaaactggcttatacatttttaagtactagtctttagacataatctctagatctttaatatcaggattgtttctaacatttacagggcctggagcaagagcagaaaggaggcccacataccatatgtcaaatatttaaaagttacatatcaagctaacaaactgttaaatagaatctgttctatcctctattcttgacgaatatatcttcagaattacaaaattgaaagatgcgttcaaagatttagcttttatatcactgaaagttggcaaaatacgaaagatgagtcaatttacttattactgtacatgtctgctgttctattcataagctagcaatctttgcgtaatgtaataaagatacatataattcaaaaataattatgcattttaataacatttatttttattgctttcattctagtaaaaagttattatgtttatataatcaatactttcacctaattgatacactattgataaatatgatttaaagtcttataaattatatgtaaatgcagtgaaagtttgtgttttatattttaaaatataaaaatcttttgtattttaaagtgtttttattacttaataattattttaataattaagaactatattcatattaacacaatccaaaatatattttaaacaacattgtcttaaacgtttttgaaagttatttttcttctaaaatattcagaaacatatataaaattaaaaggtaaaatacaaattataattagtaaatattacaacttaaaatcagaatcatttaaacaaatgaaattttaatttatcttttgaaaatttaagttttgttaaatttgttttataaaagtatgaagaattgagcattcaatgtctatttatttgacatgtaaagaattgtcattaagattcatcattgttttactagatctagatatttattaacagaaattcaaagtatgataacttttagaattacgcagctgttgtgaatacctgcagagtcatgatttggaggatgagaagtgaaaaactggaatctcagcactactaaacaaaggctactttgttaatccaacaatttattgctctccgactatctcaaaaggcagatttggtaagataattacataattactttgtcttctttttgaagaattttgcccttcaatcactctcttctctgaggaagcctctgtcccttacattgattttggcccaaacccaaagatcactgcattttgacttagtggactttaaatacaagaacagagtacagaagatgcagacatgtgtttttgtggggtctgaaaggtgttagttatgggcacaaatgtttaggaccagagagagtgctgtgtctgttggatccggcttctgagtcaggcactcatgtgtttgcaaatgaattctatgtgtgcacttatgccctgaaaaaccatctgaagttcaatgctcaagcttgggccccacttgctcataccgaaggttggttcttcttaatcctaagcagtaaaatgtattttttaaaagatgaaaagatacgcattcaaatatatgtgcctatatatatccacgttatcttatatttctactatgcatctagtgggcgtgaaggtgttcacacttgttttattagcatgtaaatgtagatttatctaacaaacatacttaactctctagacatcaaccctatcaggtaattcttgcaatattagaaaaatgacaactatgcaatgagtttccatcttaagttgaactctgattcagttcaactagtaatcctctcaaagagatatatagatgtagtagtgtatgtcatgtaaactgtaactgtcagtgttaattgcccagaatctgaagtttctctcccagttacaaagttatgggctaggctatttgagaagcaaaatggattcattttgcactgtgggaagatttggctgtggcaaagcttttttgttgttgttgttactaaaattgcattctccaaatttagtacttactcaaaattcatgtgtttagagttacaactaaaaatctgtgtctcacagtgtttgaattagttaaagccaaatgagtttctttttttttttttagttggcatttctctcagagaggaaatttataaattatttaaaaataaataagatctgatatgtatgttttaatctttcagattatagattataattgcaaatgttttggtttaataaaagtctgtaaatcttaaaaacaaaatgtggtaatttcctaaacttgaactaaaactatagtccttcatcttttctatagaactacagatgggctacttttttttttttttttgagacagagtctcattctgtcgcccaggctggagtgcagtgccatgatcttggctcacatcaacctctgcgtcctgggttcaagcgattctcccgcctcggactcccaagtaggtgggattacaggtgcatgccatcatatgcagctaatttttgtatttgtagtagagacagggtttcaccatattggccaggctggtcttgaactcctggtctcaaatgatccgcctgcctgggtcgcccaaagtgctgggattccaggtgtgagccactgcacctgggctgggctgactgcttttaaatataaagaaaaaaatgacaaactatattgcttaatcacgatcacatattaatatggtttggctgtgtccccacccaaatctcaacttgaattgtatctcccagaattcttacatgctgtgggaagaacccaggcggaggtaattgaatcatgggggccggtctttcccatgctattctcgtgatagggaataaatctcacgagatctgatgggtttatcaggggtttccgcttttgcttcttcctcattttcttttgtcgctgccgcgttagaagtgtcttttgccccgcctggcccctgtaatcccagcactttgggaggccgtggcgagcgacgccggcggatcacctgaggtcaggagttgacgaccagcctggccagtatggtgaaaccccgtctctactaaaaaaaaaaaaattagcggggcatggtggctctcgcctgcagtcccagctactcaggcggctgaggcaggagaatcacttaaacctgggaggcgcaggttgcagtgagctgagatggcgccactgcactccagcctgggcaacaagagccagactgcgtctcaaacaacaacaacaaaaaagtgcctttcacctccacccatgattctgaggcctctccagccgtgtggaactgtaagtccaactaaacctctttttcttcccagtcttgggtatgtctttatcagcagcgtgaaaacgaacttatatatatatatatgcatattagctatggtaaggaatttacttaatctggaatctcacacatgagtagtttaaatatatacttttggtttagaagttcattttaggaatttggggttgacccaaattttctgttaaaactctactttttctttggctttactccttgttatgagaaaaaattaaactaaaggaaaataaaaccgatatgatgtaaattgcaatctataaatctctaaaccttactggtgacggtgacacacacataaattacactcatgaatgaagacagttgggacaaaagttcagagttgttttattacacagagttcatgaccagtagctaagttcctcttcctttatgtaatggaggtgggggtagagggaaaaaaaggagagaaaaagaactctttagtgagggtttccttaacaacaaatcagcttcttagactcctgggcatttgcgataagtgtagtgcattactgcgaatatcacacactgtggcatgtctgaaacagattcacagtatttcaaaatgttcctgccgatgctatacaagtaaaggctctctatcaacaactgagcatatttatgatttcaaaaagactctagcatttagaataactcaagttgaaatttaagagctattactctattaattatggtgaacttttatggggcttgtatggtttcatcatctatttttattctttagtagtggtatttactgaaggttttgaaaactggtagtgatctagtcaaatttgtctagcattcctattttgtttggctcacccagcttttaaaaaaataatgaatttattaatgaataatccttttagacagtgctatagtccttacaatggcctattttgtaatatcagtttcattagaaattgttaacaaatatctttgagttttgcttctcccatcatttctattttctcttcatgaaatcttattgtctgagtattatgcatgtatacatgtataaatttatctattggcttcaattctctcttttgtgtctttaataatttttttaaagcattctttataactgtcctgaattttgggtgaatttatccacactattcttcagttctctgattttctctttgaaaatgtcttttcgagagtgtgccatctatggagtcttttatttcaatgactgcaatttttatttctagatttcaaattgtttatattttataaatacctttgtttcatttatgccagttttgtccaaaaaatgtttgtggttattattttaccttatctctgcaagaattttaaaattgttgggatgctgtcatccagagcctggacttatagtgatacttgggttgctctgctacagtgggagtggacatgttgcaggttgtgtggataagccagtagagaattaggtaggcctagagtactgactttgaggcagactcagttttccttctcacatattgctctgtatatgctaaaccctgcatggaacactttaggccccacttgtaatacagaaatcaaaattcccatatgcctttgcctcaatgcctacctcactcttgtatgagttttttagtccacatttagaaataaactctataatcacattttattcttcttgatcttaccatagattccatccacagtgatgaaattagaaggatttttcagaatgtgaatatatacaaacatttatttctaaaaaaaaattttttttttttaattgagacgaagtctcactcttgtcccccaggctggagtgcaatggcacaatctcggctcactgcaacctctgcctccccggttcaagcgattctcctgcctcagcctcccaagtagctgggattacaggcccctgccaccacacccagctaatttttgtatttttagtagagacagggtttcaccatgttggccaggctggtctcgaactcctgacctcagttgatccgcccgcctcggcctcccaaagtgctgggattacaggcgtgagccactgcgcttggcaaaaaattcttatttaatggtcaatcatagagtttgatattacagtctgtattcctttgcaaacactaccatgacaaaatactgtaaactgggtgatttcaccggcagaaatttactgtctcacagttctggaggctagagtccgaaagcaagatgttggcaggattggttccttctctccttggctggttggccatcttctatgtctcttctcattgttttccctctatgctccaattttctctttttacaaagacaccagacatatccagttcgtgcccaccctaatgactacattttaacttgattatctttgtaaagaccctagctccaaataaagcccattcttaggtactgtgttttaggacttcagcctgtgaatttggttgggcacacacttcaactcataaccgttcatccaggtcatcattctgtaggtgccagattaactcagaatttatgtttgcagatagatttaatatattctaactctgcacttctgatttgaattatttgaaatacatttttccataagcttatggttaaaattatgttctccattcttctaggtctgctaaagtgccagtggatgtttttaaacataattcataaattaacagagcatcatagttgaatagccattggagaccatttattcattctacccattttaacagtgtatgcttaatacaataatggtaaacaaaacaaatatgctatccctgcagtagggcttatggctctaaggagaatcagccccttgatctctttgaggacttttgatgggtatatggtcccttggtcatttaaccaggaataattaggcaaacaggatctctagtccttgctacaaatagttcaccttccaaaaggcaggattctttcaccaatcccatagatgtgatgacaacctcccttcatcatttccttgaaggtcttcaaggaaaggaaacatgattggaaaatatttcttgaaaatatcttatttacatcaaatatccctataaatctaacccatggccatgaattttgttgtcctcagagccatgtaccctagcaataaaagtaagtctaatctactttgcatatattaacctatcaaatatttgaagatggctttatgtctcttctgctttaccttttctttaagccatggctagtttttagttctgttttttttctcccccaccattcgccatatggtagtttctgttccaaccagtctcttttagaactattttagtgggtttatatagtgtgggttccagaaatgcgaaacattaatccagaaaagcatttctttggaaaataaatggaattcttacaaatactaaatttgttaaatgtgataaagcatacagtgtattgataaataaatattccagatttaatttataaaaaatgttgagtgttccttagaaggaaaggcaggaaggaagccttccagcaggctaaacttagtccatatgacctctaaggcctcacaatatgtgagtagagctgatgctatctgctgattggcagtgtcagcacctccagtacttcatattacggatggataaacctgatgcctaaacaatttaaccagtgacaaagctacaatcaaaactcaaggctgctgaattggaatcattgtttaatccacaaagagatgaattacgtttaaatgctgtatattttaacaaatctactttgcctttatttcaaagggcatgatgacaaaacatgacatttgatatttggacttttgaaacttcatacctttttcataagcccacgaattaccattttaattttctttttgtcagtaaatgatgcttgaaaccagtaccttcattgcatcttggtattcaccctgaggtcattcttaaatatcagaaatgaaaaataaagtagggcctggagatgatttgagagttgaattgtaaatatctattggtgtttacgtacatacatatataaatgcatgaaaagctaaatagtaaaggttttggggggatgtcaatgacttcaatataaaaattatcacatatatgcaataacagtgactttttataaaatatgtaaaaataatgtagtaattaaacttttgataattcaccaatttttaaaaaaataataaaacttaatagcgaggggaatacaaattacaatcaccatgcaattctactatacacactctaaaatggtgaaaataaaaccaaaagaacaaactattgaattttagaataaaattatcttggggaagtgaaacaaaaatatgaatataagcagcaaaaagttatatcatatttcaagatatagaaaggctacttcatgtactgcttaaagatgcttatcaaatcactttggaatttatattccatacattaaattaaaagagtggggatagactgttaattaaaataccaatatttacaaaaaatatattctatactactactcaaacttaagatgacaagttgaacatgtgaacatgtccacttaaaatgtgagaaaggattcggtcttgtagaattactttaaatgatacccaagcaaataattttagttgaggctagagtccagttaaaagctgtagctaggcaaagtttgtgaaacctttgtccactttgaaatgttggcatccttctttatcttgccctcaatagcaactgtaacccatcagctgcctgtttaaaccatgtgggcagatgcccatgaatgccggaaggggccttcttggtattttattggcaataactcaaagcttattaaaatccagatggaaggacctgcagcatatttaagtccatatgcccaaatgagtactgcagtatttaattgcttgcatttcagtcataattcctttcccttgtcttactttttctccaaagtgcttatatagtctttcagttgatgtccccctgaattatctttaaaacctgttctaatgctcatttgtaaagcacttaggttaaattctatgtataatgttttactatttttttattggtgttaaatgaacattgagccatgaagaggcaattgggtgagtcatttgtgactctttctattgtagctctattaaattaaaaatgtctggtttttaatccaataatattttcctgaacacattaaggctattacgtacacatggcatgccatctctgcagtttggagaattagtaagagagtcctactcttgcaaatattgtgtccattaactgacacctagaacatacctcatgttactcaagtcaataatgctatttatggttttaatagcatgaaatcaaaataatgataaatgaaaacaaatcagctgtcccaatggccaggaactggaacctcataattctatacatagccattggccttattgtcctcatctgttgcccacatactcaatcacaagtctaagtcttacttcctctcctaaatctttataagagaccaggggctcccttctatgaattctgattacattcaaaaagtcttagcactcgctttacacttatcttgtactgttctgaaatgttaattgctgcttcctgactttcttttatctcccaaatgtataagtttctggagaccaaggactgtgtcctatttttctgcagccatacagcgcctctgtgttgtatgccttacagacattccacaaaggtgctatcttgggtgtgtttccagggtttgtttccatgagttcagaatatgtggcaacataattgtccacttaccactctgcaaccctcatctgatgccatgtttttagagagcagagtctgtatatgtgcatgtgtgtgtttgcaagtttgcttttcataattatattgctagtacttagtcccagagttataaatgtggaccgtacttgtctttcagatatttactgagtgaaagaacaaaggcagccataggacttttgtagatttcctgtttcacccttgacaaattaccgaacctccttgaatacagctccttggctaactctcttcactatgaccgtttggggagtttagttagtaggtagaatatttctcaaaacaatagagaatcaaaacaatctcttctgagttcaattttaaaactgtgattccattcattgtcaattctgacatggcattaattaaagatatgtcttaaggaaacttcaaagtgttaagtgactcacaagaatgtggtagtaagaatattctcatttaaaatatagttaaaaagataaaatgacctaaatgtcacgtttacaaaactgctggcaaacagaaatataatttgtctagaatagacatttagaatagacagagagttaaaaagtcctttcactaaagtcttacatttttaaacccacggaaaattaaagtaagcagttaagaaaaacaaaaaaacgggagaagagaattctagacacacatctactgcccgcagttggaaattataattaactgcaattgagcttgtagacaggcaagttatactctacgtgtgatagaatttgagaggcatatcagttctgtctatatggtccttgcctgtgggatcattagagattgattagagtacgtgtcattgatgtacctgggaaatgggattgcataatagtttagtttgtgttcctcaatttcatctgaattataaccaggttactatggaggcaacctatgtgttgtctgtattcctagataactggatcctccctcttgtgtcctgaacagcatgctttatagaacctataacatgatgttactctcagtgattacattttcacattccctttgaggaaaaggatcttgaaaaatttatctctgcatccccagagactagcacagtgacagatttttaacagtgtttttactatgtaacataacactgacacagaaaaacacacaaaacaactgtttagcctagggaattggtaagacgaactttatctttcttttttacttaaattttagttgctgaagaaaccagatctctgatctgtacagttctccatagccctgatttggatgatggtatttccatggtgaaatttaatatgtccctttttatttcctaaatattggtggttgggttgggtgcatagacttgataagattctggtttgatgattttggcaagactactttattgatgatgtgattatacaagacaggaaactcatttcttgttctctctttataagactttgtagagagataaagtgaagtctctgagggttttaaagttgaaagcattttgtttgatactttgaagattcagccttggtcaaggctaaaaaaataactgttgtgttttttctagtgtggggctattagaaatagtaatgctacgaatatccttgtagacatctttcagtgaacatatgcttgatttgtgttgttgtatacctagggatgaaattaccaggtccgatagggtccttatgtttagttttaataggtactgccatgaagtttttcaatggggttgtaccaacttacttgcccaaaagtagggtatgtacttctaccagttgttctacatgccagtcaatatttggtattgagaataagttttaaagtttagacatactggtgggtacataatggtatctcaattacgaatttgacttacatatccctcatgactaataaagttaaactcatcttcctatgtgtattcatcatttaatatcttctttagtgaagtaccttttcccttgggttttttgtcttttctttattaatttctaagactatttttaaaataaatgcaaatcatttcatcctttgtttcccaacctaagtttttccaggtatattgtctgaagctcaagggagattatgaaataaagtttgatggcagaatagagatgtacaatataatgcatccgcataaaggcttccaaaatttcagtataaactctcgttcattttaaagtgcatcaggatatataaaagcccaaatatgagataaagttcataactcataggtcaatatcctactaaatgaagttacactaaaaattatcttattgtgcccagccgcggccagaaggttttacttcaatgggaatataacttattttgatagggaattttatttctctgttgccgcatagcatctcctcccaaggaatgggtacagatctttcagtgtttcagacactgactcaacgctgtctgagttaataggaaataagttacacagacttgactgcaaccttatgtaatctagaaaacaagctaatctctaagccctagagcagaaagtgcaatgatattacaaagtgttagtatttcacctacactcctatagtcaaatgccataacggagaccagtatgagttacacggaaaaatatattcatttcagtttctttgggatgtaccaagttactgtcggactatgtcaattgtctcattttcatgagttggaattaaacctcctggaagaaatctcttatgcttctgttaattatgacactacatacagtttgtgtgtgggaaagggttgataaaattactctatgcatattgtttccttgattaaaggagcaattatataaaataatatagctagaatttgatagtttaataggtggcagacactaaggtgccttgtatgtgtttaataaggaaggcagtgtcactaaggtgccttgtatgaccttataaggaaggcagtgtcattatcaaccccatttattaatatgaaaatgatagactggttaagataacaaatttacaaagatgattggcaattttggctgctgcaggcaacaggttttaactgaatgtattactccattttcacgctgctgataaagacatacctgagactgggcagtttacaaaagaaagacatttaatggacttacagttccacgtggctggggaggcctcacaatcatggcagaaggtgtaagccacgtctcacttggtggcagacaacagaagagtgagagccaagtgaaaggggtttcccctgataaaaccatcagatctcatgagacttattcattaccacaagaacagtatgggggaaacggcccccatgatttaatcatctcccactgagtccctcccacagaatgagggaattatgggagcaacaattcaagatgagtcttgggtggggacacagacaaaccttatcacagaggttcccttttttgtgaaactaagccatctttctggtaccttggtgcagcacttttcccctatgaggaggctgttttatacctgtgccacaagatctgatgttccatgtttttctatgtatactagaactaaaaaatcatacctaaaagcaaaggttttctttcatctccacagtcagcttggctagagaaaataactcccatgaattcccaaaggcaggcagctggggctgtatctgcagctttcatgcctagagtctgttgaagaccaatatttctggcatgtgcattataaaacattcactgtcttcactttttgaatattcaaagctgtaaaagcatttcttcctgctatgtcttttgtttgtggcggtggtttatattcttctctatttggtgctgatatggtttggctatgtccccacccaaatataatcttaaattgtagttcctttaatccccatgtgtcatgggagggacctggtgggaggcaattgaatcatagggtggtttcttgcatgctactctcatgatagtgagacatggagtcaaaggagatcattttgaagctttgactggactaggaacttgcatggcacctgtagccccgtcattttagccaatttctcccatttggaataggtttattgatcaaatgcctgtacctccattgtatctaggaaataactaacttgcttttcattttacaggcttataggcaggggcacttgcctcgtctcagatgagactttggacttggacttttgagttaatgctggaatgaattgagactttgggggactgttgggaagacatgattgtgttttgaaatgtgagaacgagattttagaggaaccaggggcacaataacatggtttggctgtgtccccacccaaatctcatcttgaattgtagttcccataatttccaactttcatgggagggaggtaattgaatcatgggggtggtttcttccatgctattctcatgatagtaagttcttgtaagatctgatggttttataaggggtttccccctttgcttggttctcatttttctctcttctgccaccatgtgaagaagggcatgttgcttccatttccgccatgattgtaagtttcctgcggcccaggaatgtggaactgtgagtcaattaaacctctttcttttataaattacccagtcttgggtatttccttatagtgacatgagaacagactaatacaggtgctgaacttagcctgctggattccttctcctaaattcatcctttctcccttgaggagctcttagtaagaagtaaagagtggtcatgtggagtctagcatgttaggttcttctcctaaactcattctttctcccttgaggagctcttagttaagaagtaaagaatggtcaagagatttaagacacaaatatttcttgtaatatatattaatatatcacatacacacacacacacacacacacacacacacacacacacacacagacacacagagagatgggttaaggtgcccaatcccaaatgccaaaaagaaacgaggtgggtagtggaagggtgatgtttacttgaagttttgtttgttgtttaatagaaaatgataatgcataaaagtaggtgggaatgagtcagttggcacagaggtattggtcatacatctgagaaaagggaaacctagtaaggtaaggttgctagaaaggtgaggagtgaacaggttaccaggtgtatgtgaagccagcccttccatttgtcagaagagaaggggctggggatggcataagacagttatgcatgtatgtgaattcatatggtggatggaggggtgatgagaggttttccgtgttacgggttctgctttgtccatgaggtaggagataagatcatccagccaaggttgaggaattgggaggcagtgatgacaaatttgagaggcattaaaaagttttagaaatactatttcaattcaaaagagagtgagttaaccagagaaatctaagtgggacttatcatgaaaatcattatagaattgtaggctctattaacagcatgtgaaatgttacatagcttgcacccagtatttgtttgagttttaattaactttattatattgctagtttttagtgtgttatctatcagttctctgtatttcaatgctctctcatttttctctgatagcagatgcttgaagatctattaggagatcatttctgaatatcaaattctgtgtcaatagaactaatcatctttaaaaaaagcaaccatactcagtgatataaaccagtgtggctgtagtcatctgtctaaaccaggagaaataattctttttttcttgcttagaatcttttttgttcttctttctcccttaaagtcaattgcagttgaaaaaaaccctgccctttacagctgggatctgattcataaccccaggttttcccattttgttctaactggagggtccatatctgtttctgttatacctaaatggtggttattactcagctcctgggagaaagcctcagctaagttatgaaaaataatttttgaagagtgacacagagaaacagccaggaggaaaagggagtctacttttctgctgcttgccttaggcccctgagcggtgggcccaatgtaccaagagttagaagtacccacaatcttccagccccgaaggaaatgtccccatttacatctgcaaaagatataacaagggtgtgttcaaagctgtcactctgagctgtgcttcctaggagttcaggctgctcccctttccaggggaagttgaggagaggacggggatgaagtgggggagggaagcaaaattctgtcatgtccgtcaacaggtgaagcctaaaaatttcactggaaaaagttgtggaagaattaacagctgcaggcctgtttggagaaagtcagcagagtagtttccatctggcatttgtttcatctgcagaagaatttttttttcctttttaaatagggcttgagctgaaagcccacttcatttagatgttaagtcctaggataccaaggactttgcaaactgccaggatacccttctcattcccttccttgtacacctcccaccagccggtcatcctggagctcagtggaaaaaaataagatccagggattaaaataattctactgcaaggtgagaaccttcaggccacctgcgccctcttagtctcgagcagcatcagccacagatgaatgggctggatgaaagaggcacagaggtttgctttcgtagtcaacatataatgctgtgtacacagatattcaacaagcttctgtgtatctggaataaataaattttaaaaagaaacaactaacagcttattcaagcatgcagctgaatactgcatggcctctttaagaaagggtgttgtataaaagtaacctggtttcaagctccaatacataaaacaaaattgaaatgatgcagtgaaggtaatgatcatacagtaaaatagccatcagaagagcgagaatgtaggttaaagaatttcagaatacctaaaaaccctactccataattttcagaatcaatggaaaaccaaagaaaaaaaaaaaaaaatcaaagcaaaacaaaacacctcatttgcttagataaaatagaatgtacatatctgatatttccagaagcaaactattcttacggttatcttccagcgacttaattttccttttttcatttagtatataagattagctcaatgataaactctttgttggattattggtgagccgcagattatcttattattgataaaaatatagggcaagaaggtgaaataggcagatgacagacaaccaaagggtaagtttactcaaaagtaaaactccatacaggtaccagatggtgatatatattgacttatttagaaagaatcttctaagtcaatatttcttcttcagaaagaaaggttgattacaatcgctctaaacaggattatctaccctagggagattagaaatgaactttctgctttcattctctgccagtaatatatttataccttaaacaggtcaaacttcaagtcatctcaattaggatcagcaagtaaagctgccacatagctttaatcagtgggaacaaaataaacttacaggctgcttcttcttcgaaggtttgtctttcttgtttggctaggatgatgacactgggtcagtgaaagaaggagccagagagaggaagaaaaatgaatggctcgtaattcttttattcagtccttaaggatctacagtgggtttatcaaataatgataaatatcagatagaaatttattttttagaattctcatttatcgaataatggtgaatatcagatagaattttatttttcagaattcctcttgtgaagaatattattgttatatttttatagaaaaagtgttttgataagttatctagagttgtgactaagactgcaattgtacgttaaagtaaaaaaaaaaaaaaaaaaaagtagctgagaaatcttcaaaggagagtaatggtgcttccttttcctgtgtggccatcctattttatggtgaagacaaacgttgcagtatatggaaaacacttggggatttcttaaaatgcacattctgattgagtatagctgtagtaggcctgagtctacatttcaaaaaagctcctaggtgatgctgatgctgctagtccaaggaccacactgattgtctactttatagaatgcattgattccattttctttgcatgttttgggtgtaggcattgtaagggaacaagttacgtgtaataaaggacctatctagaaaagacaggtgtcaaagaatctgggtaatgcctaccatagtagaattattaaggaagctcaatgggcaatatagctaagaatgtttaagttggtgctttggggtatacaatggcaaacccttctctatgctcatacaatatattcaatgaagagttctcggcaaaaccaataggttctcagttttccatccaggtaggcctaggagaaaccgaagatacaagagtaagaagatatggagccaaatggcatctgaatggcaaaaacaaaataatagccaacatttattggacatctatctgtgttagtccaagtgctttgcatttttgactattattattgccatttaacatgcaagaaaacctaggacgtggagaggttaaatctgcacccaggctctctaacgcttaactacaaagtccaaagactactatattcagtcactcaagagttgaaatgtattttcagcttgaaaatgattttccctcattttcagcttaaatgaggcaaactcaatcttcttctccccttgctctctccttttctctgtcccttctccttgctctttgtctctctgtaccctctgccccaataatttcagagacaagtactcctgaagaattcctgagagctacattttagttcatattctctcaccttatataacattttgattttctttccctgtttacagtcacaccttcaaactgtactaacacatcttcattctgttaggttaactcgtgcttttgtgagtcacaggctcttaaggtgaaataaatgaaagaaatcacaaaggaattattacaagttttatagatacattttccctttaaaaattatatttactacccgacttaaaacatagaatattaccaagcgtgttgaagcccccaagtattcttctccaaaaggtaactactaccctaaattttgtattcatgagcccctcactttccttaataccttgaaaataaatgaatgtgttcctaaaacagatattttgcacattttgaacactgcataaatgacaacatttaaaatgttttctcctgaagtgttttttccccccaatcaaccttatgtttgtaagatgcattgatgtaggtttatataggtggagaccattcgttttttcaccactgaactacaaggcatggttatgaattatgaatataacacagttgattagtcccgttgttcacatgacatgtggcttagttccaggttgttttgcttttgttattacaaatgtttttcttaaatccgtgagttccacaatctattttctctctgcctgctgttttatattctcttcccttcactatttcagtagctctcttccttggctgcctgttggaatacctggggaaattttagaacccctgatgcccgtattgcatgctagaccaaatatataagactctctgaagctgggactcaggtattaatattatataaggttctgtaggtgctgccaaaatgcagataaggtttcataacattgcttgaattccaccttatttgaaagaaaaattgcttccctggttccagttgcatttaatatatttttctagaaaactaacctgagaaataagaagctaaaatgccccttcacacactcaggaatttattttcattagttggttttattttgagctcgctggtttgcatgtccatctgtctgcttatgtcacatgtgcccagtggttacattattgcctaatagacctctaagctgtggcttcttcaggaagcattatttatttattcattgaactttttgggtaactttgtaaaacagagttctgtttacccagggcccagaggtaaagacacaaaagtagacccagtcctttaaaaagttgaatcagagggaaagaatcacagaattttactctaaagtaaatattaaacctagaatcatatgatctgccctaggaatttgcaaaccacagatacaccatcccttttgcagaaatatgttcttttggccactagccatttcttaaagctgaacccttggtaaaggatgagtcaacagggtgcatcatgactcaggctccaagtgaaacagagaatgagttggtttaatggcttttaaagtggctttctaccctgttatgcaaagtgtagccccaatatccaagaaaacaataatttaacatgatccattggttggaactgaactcttcattaccccagtaggacagcattagataaggagctattatgagtcattccttgtagagcttaataacagcaacacagaggcaatttggatcagtaagcaaccaatactctcaaagaacagtgcacagcaaaataaagctgctagtgacattctctgtcctttgaagtgggggtgtcgttaatgttattcgtcaactatgtcaagtattttccccaaagggtgtccaggaatcattggtattaagaattactctcatcgcttttatctatcccaaactcttttttcttgaccatcaagataattttttaaaaatcaagttttgtaccttaatttccaaaaaataaaaatttggaggaaatgaacttgctgacaaatataatcaaggcctatgtgacatctacacagctctcttgcgattatgtaaactttacagaattttttgtacataacagtctaatacctaactgaggagtttattcaggcaacagattttatgcagttacattatataagtgtttgaataaaacagtaatctgacttctcttcttggacaagtgacaatatttttgtccttcaaattctctcagatatggaggtttgctgacactagataaagaatccttattaaagttttctaatttctgcaaccagaatgacatgttgcatttgcccatttttctctgaagtgctatttgcatcaccagaaacttaaataagcctagattaaaggcatactttatgggcatacataagccttttcttgaatgcataaattttggaccatttcttaacctatatttgggtagatgaattttgaaccatttccaaaatattaagtccttgattgtatactggcagagaagcagaaaaataaaaacaaattaaataggaaaggacgagagagattttcacttgcttgtttgttttctcaagataaaaatgaaatggcaggctgattatgagcatttaccaattatattgccaggtaccccagtttttttttcttactcacacacttgaatgccacagaatgtttgggaaaggttcagcagcaaatctaatgctctcccactggggtagtgaacctatgtgttccctgtacttgggtgaaggataataataataaaaacatatatttggtgaaaatatttatatactttagttacccagtagttatcatctataaaatatgttgaatttcatttatccatatgggaggtagagaattaaatatatattcaaaaaatgatagaaggaagagaaaaatgttaaagaagtcagagaaagaggggcaatccccatttgttattcagtttttctttattggctcttataagtagtttctcattgaaattgttgctaaagaagcctaaagaagatttgactctcttggacatctgtttatttataaaactaagactataggaaaccctacacaaatttttgtgtggaggctttataatttacatttctgccactggacaggaaaatgtgtctgcaaaatgaaagcagaacaagtaaattatgcttgtgttcagggcttttctattcaatctgtctggatatctgcttctttatttctatttattaagagctgtattaacacaaagtaccccacattaagcaatagcttatgtcattgtaataacatttgagttaccacatacatgtcgtgtgatctaaattctggtgaaaggatgattaataagtcaaatgtatatgaagaacatgcttcatattttgagatgagctactatgaaattgtttctactgatgtagtttaatggaagaaaatgaaagtaattgcggtttttgcaatacttttaattgcaaaaaacgcaattacttttgaaccaacctaaatacaaaataagttaaagcaactcagattaggattttattgcctcgtggctgtctagctccattggatggaagaacatgtcaatgactgtaaggcagcaagttcaatccatgtgcgtaccaatacgttttgttctatctttggccagagccctatcccttagccctgccgcatgtccctctgatgtagcctttatttcctgagagaggatccaagaaggagaacatagatgcaacacacacacacacacacacacacacacacacacacacacacacacatacacacatacacactgttttagatatatcttctggtggttgatcaaagccataatctctttatatctgacagccctattagtatgtttcatgcactgttgctctgatttaataaacacattacattcaaaagcagaatccagcagacccttttaatttgctctcctcagaagttcaacacaccttatggaaacttggacttattttgcaagagcaaaataaaatggaaaattgagactgattccaacaaaatatattgatcctggcaccagtacgtgtagatcttcctctaggcctttcttaatgtcatgactcaaaggaaggctgttttctttttccttctctccctcctttccatcttctctgccttccttctcactttgttttcttttttttccttaatgcttactaccagtagttaataacagtagcaaatacacatcttattatgcttcagcccctgttctaaggctgtccctatattcatgtaatcctcataggaacactatgaagtaggtattattattatctttattttatgaactagaaaggtgagttccagagagactaagtaacatgcttaatgtgaaattgctagctagtgtcagagtcaggattcaaactcaggcaatctgatttttgtctggagatcattctcctaatcttttttcattctcctggatatagataaattagactgagccacaaaataaaaatatacttctaattaaacataagatttgaaataaaaatcgtgcttgaaagtgctgacttgtatgttttaaactctgtgtgtatttgtatatttctgtcattttcaaaaatatgaagtaatttctaactatatattattaaacatatacagttattgcttatagtgttatatgccaaaactgcttttaggtgagaatgattttaacactgcatttgctgttggcatggataggaaaaaaatgttattaacacaaactttaaaaattaagaagtctttgttaaagaggttaaacatttccctgccatctttatcctaacttccattgaaaagtttcccctccatatatagcacaaatgtaaattttagcttatcttttctaaatttttataatttcataattaggaagatccaactagatgggatttaactgtaatttttctattaaggcttcgaaaacctcagaatatatcagacgaattagttataaaatttaatactctatatatagtctctggagacgcaaacaaatattgagctttaaatgatgtgttctaagtagattttttatatgtgagtgttttactgtgctgctatataatatcatttgtcatatatgaaataaacagtattctatatatgtggttagcagacaagagtttcagatctcatctgtacaatggaattatgatgaccttttgaaataacattccactctttaatcttaaaattaataatgtcatacggattaaaacattattcatttcttttctttaccatggctcatgtatcttggagtcacaaaaccacttattaccagggatgtattggtctttgaagttcatataattacaggagaaatttaactcactcacctttagtgggttttatatattatagcagaagattattataattctatttaattagcagaatgaaaaggtagcttgaaaaatattttccaattcttgtttggatgactcaggggccattgtcaatcttccaccatggtaatttaatgtcccctgaaatgttgtatgccaaaatgattaagtatcattacaaggagaaatttttatacaaaggcaaataccacagcagatcatgttcactcaatcacaattaaaatgaacgcactttaatagcactctagttttgtttattaagcacaatgaagcaggtgctttacgctagaaaaattcatcttgtttatacctgagacatgtaactgaaatcatcctgctgtccatattctttgtgggagcttcatttatttggtaagctttagagagaaataaaaataagcatatcacataacatgacaatgccaacctctttcagcacagccttgaattgtctaagcaccttcatgtattacaaataaattccctgggcaacatttcctctggagtctaattagattccactccatgtatttacaaacaggaagcaacaaggctgtgacttcatatttccactcaaaggcctcctcaattaacatatgacattggtgttatttgggaatgaacactgagttcgttgtaagttccccgtataacaaagaaaaatggcctattttttgttatctcaaagatgacaatcattatattatttccatattattacttgacaaatagagacagtttaatactaaaatgtttctggtgcctttgaaaaatgggcaggtaataggtgggaatcataatttagggattaaatatctggagtacacttggagaatgaactctttgataaataatggcatagaaaagatcccattacaccagaagatgtggacagaggtaaagtgtcataaaagcatgcaccttcgtaaagtattgagaaagcagtgcccacctgataccatcagtgctcaaactgctaccatctttatagttttaaaaaaatacttatgcatgtaaatatctctatatgaaacagattccaagatgattcaagagaaccaaaaatatttttctgttgtttaggtatttggtattattttaatagagccaatttcaattctccacaaccaaaaatattcttagtacaaaaaatctaatttaattgaaagccattttagttcaatttcccgttaaatgttcttttaggccatagtatatctatatattgttagggataattttttttcttttggcattaacaagaatatatgtatgcaagcattggaaagcatgaatagcactcttagtgattacatgactataaattaaaataaccatacagctgttggtaatatttatcattctatattcataattgtgtccctaataaagcactgcaggcctcagaacagggtattctcctttctgttccactccaagtggaacaaatagtgacatgccgtttccgacccttgagtattaacccggcagtgattattttgcctgtcgttaaaataacaagaatgccgatctctattggattcggttactgtatggactgctggagattcaatgtggttcaacaatatcactgaaaattagcaaacataacacattctaaatgtccacttgttctttatccagttacaattattgaaattccaggatttttgaaaaggtaaggtcatgaatttcttgttagtgaatcaagttaatattcagatacattctatgtgttccctgctctgacttttagtggcttaaagtgcatgtgatacacacaaaacaaagtagtcttgaattaggtattaatttgtcttttcggttgcaaatagacttctattacggcaaatacaggggccaagtctatatattttctttatactttacaagtaattgatacatagaaatacttaacagattccaagtggatgatgcgggtaaagagaaacttaccatttcctaatattttcattaatttctttttttttaaaattttactttaagttctgggatacatgtgcagaacgtgcaggtttgttacataggtatacatgtgccatggtggtttgctgcacctatcaacccaccatctaggttttaagccccacatgcgttagatatttgtcctaatgctctctctcccattgccccccaccccctgacaggaccctgtgtgtgatgcttccctccctgtgtccatgtgttctcattgttcagctcccacgtatgagtgagaacatgtgatgtttggttttctgttcctgtgttagtttgctgaggatgatggtttccaggttcatccattgagtcttggcagagcactttaattttatggggataaacattattcatggtggcaatggtaatagtggctgtgagaattgtgaggtgtgtggcaaaggtagcagcaccagggatttagatgtggtgtgcttgaacatttaatggcggcagtaccagaagtgtggtatcatcaaaagtcacctaacgagaatgttctcggggtgactgtgcccatgcttcttccaccttgggcaatgcaatactcatatttcttgcctacgttgattattagtcatttttggcacctggttctctaagctgtgaactacccgtatccctgtagtccatttcttttcttcttaaattgaccataatcaggttctgtggattgtaaccaagaatctttactcattggtattcttttgagtaagatccttcaggaaaattttattttcaatagtttgctctctgtaagaacgcctgatttataaattaggaagcttggaacaaaggataagttgtcataatggcacagcttcattggtcaagtaggagctaagacagctgataatctggtaggaatgccctttatgcagatgacaggggaatcaatgtagaagccttagaacaatggtagaactaggctttggttgggccaaatttgataaccgagaaggtaaatttaggatgtgaaatacgacagcaaaaacctaggagagaaatatttttaaaaattttttattatactttaagttctgggatacatgtgcagaacatgcaggtttgttacataggtatacatgtgccatggtggtttgctgcacccatctacccatcatcttcattaggtatttgtcctaatgctctccctccccttgcccccaaccccccaacaagcccccgtgtgtgatgttcccctccttgtgcccatgtatcctcattgttcaactcccacttatgagtgagaacatgtggtgtttggttttctgttcccaggttagtttgctgggaatggtggtttccagcttcatacaggtccctgcaaaggacatgaactcattcttttttatggctgcatagtattccacagtgtatatgtgccacactttctttatccagtctatcattgatgggcatttgggttggttcaaagtctttgctattgtaaacagtgctgcagtaaacatacatgtgcatgtgtctttatagtagaatgatttacaatcctttgggtatatacccagtaatgggattgctgggtcaaatggaatttctggttctatattgccattattaataaaaacgataaaggtgtgttatgtgccagaaaatttgctgggttattgacgtggattttctttgtctcaccattaatctgtaagatagttactataattatctttgttttaggtatgaggaaactaaagtctagagaaaataatgtgctcgagatcacatagcctggaagtagcaaagccacacctgaacccacacagtgtgaatgccaatgtcattttctctcctttttttttttgagacagagtctcactttgttgcccaggcttaagtgcagtggcacgatctcagcttactgcaacctctgcctcccaggttcaagcgattctcctggctcagcctcctgagtaggtgggattacaggcacctgccaccacgcccagctaatttttgtatttttattagagacgggttctcaccatgttggccaagctggtctccaactcctgacctcagatgatctgcctgcctcggcctcccaaagtgctggtattacaggtgtgagccactgcgcctggctgccaatgtcattttcttaatcactatgttgtactgcctgctattttagttaatttttctcaaattcaattgcttctttgtgctcttgtctattgcttaacatgcaaggaggtttaaagaattatctttcaaaagacctacaatgcaggcaatacgaaaccagagaagggagaaattgagttccaattgtagattggcttttaagaggattcaggggcatttgatgttgaactgaagaagtcagtatagagaactgcaaatcaaagaaagaaaagtagttactttagaagttcagcagtgcttaggataattagatattcatatatagaggagccaaatacttaacactttgaaagatccaaaagaaattaaatagaagccagtggttgtgaagcatccacaggaatttggaagggttaaggataatgaggtgtttttctctggagttacaagcaaagggaggaaaccaaaagcaacacaattattattaaattcgtagaaatggtctttcctcagtatttttctaagtcagagaagacaggcaaacagatgcttatcatctaatctacttatcaccagaaccgtctctcacagttctcagtagaattgagccaaactggatataaaggttataagatgattatttgagctttacttctataatcatcacagtttggactctgtccatttcggggaattcatttaaactcctggatggctgcattttttgaatttaaagtctaaaaacaaatgtgcttgctggaaacactcttcatcctgtggtgggtaggttaaagcataaattagaccaaatgacatgtctggatccagagaactgattcagggaaaattacttattgataatattttgtttattttgaattatgttttagaattcggaacacattgtgctgtattaaaactaaagcaattccactaacagggctggaggaattatcatctaattttgttttagatgattttgctggtctgcttatgggatttactatgcaaagcttctttatccactcacctggaaagcctatgttgtgaagtatataattacataatcttttgagtggaacatttagctattttctgatagttttaaaagtgactttaatgagctattttcagatagttttaaaagtgactttaatgagcaatgaggtggtagaataaagaaggggtagtttagaggatactgttctttctttgtggccctaagggattgacagtgtcaatatatgggaaggcaaagagtaagactctcttttccttgcatcatgtacttttagacctcccctagagatgaagatttttaaacactaaatattaaatagcctaagtgagatttgcaaacttctagatcatcatattaacactttcttttaagtgaatatccaaataagacttttaaaagtgatatgatcaagaaaactctagagggttttctttttccacctggttttgcatgggagcctgaggtagtaaaagaagctaccattgagaaatgatggtaagatttaaaggtaaagggttcttacaggtgccatgagggagaaaagatgacaaagaaataaacttgtcaaaatcataaatgctggaaaaccgtacacatggaatttttttggtatggaaaaaatcaaagtaatggagttaagttattggcaatgttttaaagaggaaacaggaaaaaaatgaaagagtaaaggaaatatggcagcaggattgtgaaaggatttatgaatgtttgatagtgtgataatgtttgattttatttatgctttttgtgtttggaaacccaagccattctggctcctgtggccttccccctggttaggaaaaatatcatttcaaaatactctgtcttaacccctagggttaacactatgattaataggaattaaaaaaaaatattttcccaggcttacttagaatgaattgaagcagtcagtgaaagagaaaccaaaaaataggagaaagccatatgtatgatcgattgaatatttacatttgaaaattcccttatgttgttgaatgtcacatgtacataattttccataaggaatgcttcatagaataaactgagtcccctttaccattctttctctgagaataatgggctaagtaaaatattcttaccctttttgctagtctattattagttcctaattgaggatagccttgtggtttgaagtgaaagggaatttttggaagtggctctaagaacctgattctgaatcctaatgaaaacatctagaaaagagatatctgcagataaattataatgattagtcagtgagtgggctaaattgcagctgaagaacccagactggagtttgagttgtatcttcagtttactagctgtgtgtccttttaagcaacttaacttctctaggccacagacatctgcactgtattctagtgctgtgatatttttggccagtcaggtaacctttcagtttcctcatctgtagaatgtagataataatagtacctatcccacagagttgctaagtggattaaatgaaatggtaacaggaaaaacatatagctctcaacaatgtgagcctatcattattaaaggtaatatgatgtggtgattaaatcttattaaaatacttatcaatcataaaaaatgctcgagaaaaataaacatgagcatataattttttaaaatgaaaaggaaaacgacactatgacaccaaggaggctgctttttagataaagactcagagaaggcatctctgaggagctgatacttaagctgagacctaaacaagaacctaatgaaaagatagtcacccttggtggtgactaaataaaagcaagttaaaccaactaagatgattaattagtctattagattgacacaataaaaaggtaaataataaaagtgttggtaggagaatggagatacagtctcttccaggagaaatttcttgagacaagttagcagcacatttcccaattgcaaaaatatggaaccagccaaatgtgatatatatagtccatggaatattactcagcgaaaagggccgggcgcggtggctcacgcctgtaatcctagcactttgggaggccaaggcgggtggatcatgaggtcaggggtttgagaccagcttgaccaacatggtgaaaccccgtctctactaaaaatacaaaaattagctgggcgtggtggcgggtgcctgtaatcccagctacttagaaggctgaggcaggagaattgcttgaacccgggaggcagaggttgcagtgagtcgagatcgtgccactgcactccagcctgggtgacagagcgagactccgtctcaaaaaaaaaaaaaaaaaaaaaaaagagagaatgaaataatggctttgaagcaatttggatggatttggaggctattattcagagtgaagtaattcaggaatggaaaaccaaatatcctatgttcttacttataaatgggagctaagctatgaagttgcaaacgcacaagaaagaactttggggactcacggggaaggggtgggagggtgtgagggataaaagactacaattggtacagtgtataccactcgggtaatgggtgcaccagtatttcaggaatcgccactaaagaacttatccatgtaaccaaaacccacctgttcccccaaaactatcaaaattaaaataaaaataacaaaaatgcaaactgaatattcctcaactcacattcatatctctagactattgcctaaagacataatagaaccaatgctcaaatatatgcatgcaattatttatgatggtcattcttcagtattaatatttttgtttttactgttaatttttaaaagctatttatgtattaaggatgtttacatttaaaaaattaagagtaacctaagtgtttattgatatagaggatttgattaaatgaattatggtacgtatctgcaatgcaactgttgaagatgtcgttactcaatattcttttaggtagagaaggttgtataatgatcaacctttttgagacccatgacataaagtcattaactcatgattgcttttctcctgttagccattttgatttattattagagagagggtagaaatttgtcagtttgacttgtctgtatgtattaccttaatatttgctatcatagaatcaagttattatcacagaagttgtttttggccatcattatgttccaagttattgtctgaaaaatgtatttgatgtactccttttggagtcagtggaacagtagtcaggacacctggtttttccctttctacaaataagccatgagagatcatggagaaagtcatttgccaaagaattcttatatcatagcatgagagctgtgctttgacagtttcccatgaggtttatattacactgtctgcacctgggtctaagcccatgaccttctgtgaagcttgatctgatgatattctgttcgatttaacaaacatttatgagcacccatcatgggccagacagtgcttaggacagaggacattataaagatgcatgaaataatgatccttttcgttaaagtatttccacttaaacgagctatttgagttagctatcgggatgtaaaggcactttttcagagtttcagattagactaaagccccaatattttatcaagcaagtaaacttgattttctgatacctacaactgagttggagcaatgaggtctagaatatgaattttctggctctgaatacaatgctttgtccattgaacttgacttagtaaagagtttcctaagagggatcaacaattattacatggtcaatatattatttcttttatttcttatgaacaatacacatctatgaattaattgacctgagcaacaactctatgaagtggtagatactcttgctatcaccatagtataaatgaggcagctgagtcccagagagtttaagtaacttgcctatgatcaccagtgtagcccagcttcagaatgcatatcctaatagacagaacaagggttatgagaaacattgacattaacaagtaattattttaaaatgtgataaaagcaggagtacaggttgctatagaagcatgcacccagggactcaacgtattcagttgatgaggcttccctgagaaagaggtgctccatgctgggtcacgaataattaatatgaaaactgtccacttcaacccctagatagacttcaagttatttaagaatggagtcctttttgcatgtcacaagtacctattatattgctgggcataggaagtatgagaagacatttattgaatgaatacataaattaaaatgttagatgtcttctatgagctctctcagaagcttttatattattggtttgtgtaacaatcctgcaaggcagttattttttcttctcacactactcattgagaaattgaactttggttcatttgtggacttttgtgtatttcaaatttccttgctgttccatttcagtctcaggattgactcacatctcttcgagggatcaacaattgtttcttgatcaatatatgatttcttaaatgatgaattaaaccatcttgatgttggtagactgtcagaattttaataaattttccaaatgttttttaacatcccagggcacttcatataactaaccattaacaccttaggcacacacttcctttaatttcatatttacaaatgaaccttatctctaagtattgtaaatagggtattcaaacacctgaatagctaaggtgttatgcaggcaaagtccgttacccgttctcatcaccatactttgaatattgttaaaatataaaactacccacttatgaattcttcatctccagtattccaatctatactttcacttcagttattcttccactttccttctaggcatccacgtaactcactctctgaccccatttaccttaccaagatcctttacctcattaagttctttcttttatcaactctctcctaattttacttcttccccaatgtagccaatactgatgatatatcatgtcagattagttcaggctaataaccggttttattgactttcaaaatctcatcagtgagtccttcggacatttgaattttccgctctcactccagaccttgtgagtgcgtttcaaggaaattttactcaaggaagcaaatgtgtgctgtgatgaaaggttatctaatctcagatggacccagcatcactaagtaactgtgtgacttgttcacctatttctcccatacccttaaaggccattccaaccctcacatattttaaaattctctactgtaacatgcttctcactccaaaatcacaggtaaactatagtgtgtgtcattggcagaagatgttactcctatttgcatccttggttcccagattcgtgtgtttcagtcttcagggacacagccccttatactggccatttgttaaaagagtaaactgtttcttaaatgtaaaaattgcagccctgcagagtgtcttccctgacgtggcaccttagctatacttttcagagccattccaatattcttaacggcagagtcagcttatctataaggcacaataagtacagtacctagggcctacagtatttagggctccatgaaatgctttaattttaatatcttttaaaatcagaagaaacaatataataatgaatatataatcttgaatctagtcttgactatattcatatttatactaacaaaataataaaatatatacacatacatgtgtctgtgagtctatatattttttctattggaggtaagtattttgggtccaagatagtcataatgtggtcctttccatctgactggcaacttctaggctacatggtatgtagttggcaaatgagtgacatgattttatactcactatcacatctcctttctataaagtgagactgtgatcagaaatgatgaaatgaaggatattacaacaataaatcagacactctgtgattccccagataatggtgctggcttaggaattacacgcaccaaaggctaatctacccttagaatatgactcaatcttagtgactgttaggtcttctcaagggataacagcacattttagttgctgacaggtcagatgatttgtgtggctatgaaaacatcagccttgatgaaaagaaaaccatgattttgggcccatgcattgcctccatccctattgctccgctcttgagtgactagtgcaagtattggggtagtcaaggtcagaggtttggtgccctccctttatgaatcactgtaactcctggttgcagtgaactctttgtggcttaatgctcaaagattcacacactctgtccaatctgacaggtctagccacatgcctttatataggcatttttgtagctaatcatccaacactgtgccttccaggtgcctgctcaaccagctaagccattcatcagtgcccagaagaccatttatgtccttacctaagtctgcttctttctccataccaaattcatgaccaggtgtgcatctcaaagatatgtttctttatggaacttcactttaccactgtctttcacagataccacaagatgggatatcctcagtgcatttctggcttttgccaacgtaacaggtcagacctgagtttatgtcctccatcaacaaggccatagaggttgagggagaggtactagtgcaaactttttaggtgacatggagatctgggaaactggttgatataatttcttttgtgcattctggattagactaatgtctgaacaatcttatgaccagtgcgtgatgggcagttgttttttaagtccttttatgtcatggttaggtgctcagtttctaacaagggccagttcaagtttttgactgcttcctagacagtgagtacttctctgctgaagatggtgtgaccttgctcctgaaatgagccttgcttttcatgagccctgctggcccatgaaagctgagatgtgcaactcttcccagcttcactttcagtggcatcacattgatagcttgaagctggccatgacaggagtatgtaaaacatggacattggcaaacattacaaataggatctttttgtccccacagagctagtttaccagtgtgccaatgagttttcttagtcactcttattggaatttgccctagaaaccaagcagtatagctctgtgccattcacatctctatgctgtagtgcctggtccagttccagaatttcatcttgaagggctacttcccaagaccacttctaatgcgagctgctcagcttgggtttctcaagaatctaaccctgaggcaaaaattatagtgcgagtacttttatttgataggtattcccaggaaacactgatgagagagtagacacagggaagggaagaaaaccaaaagccagtaaatgatgtgttatcaagcctgttaccactgtggatgcatgcagatcattccttctggggaatgcttataaaacatacaagatgtaccttaaagttattccaagttagggcagggaatctgggataaaataagccaactccctgtacattactggttaagggctgcttctgggaactcattactttgtgtacaggcagactgcttatcctggcccagaaataaaccctcaggcaacagttcacaggtatttatagtaaacaaactaaggtgaattctgagggtatatgaaggcaccaacaatatttatgacaggaagtagcatttatttttcatgcattttcttttatatatgtggcaaatcattttcattcaatttctgcaaactctaaattaagcccttgggatctcagcaaaaggaaatcttaaaacaaaaagaacaatgtgccaaacaatacgggtcctctcaaggaaaaactccataatcatacaaaataaagacatcagtgggaagaaaagtagccttatgcggaatctatactcgaacatgaatatgttaaagaataaaaattaagccgtatcaaaggaactttagaaaaggtattaacaactgcaactccccaagaaatgggcctggatttagatcagaggacttgcttttcaaacatgcaaccacacactaacaaaaaacaaagtcctcatatttatttggattttagaggttttgacaaagagtatcaaaaatggaaaaaatctgactttgggtgacttatttttatagtaaatgctgactgatggatttcctaaaagatctgaaatagactttgaatttttcactatgaattttcaatattaataaaattagtagagaaggataaaaagttatccagtccagataggtaaaaagataaaagaaattcccaaggtctattactaggatataaatctttttttcttaatttggtatatagtctgtatgtatgtatatgtgcgtatgtgtgtgtgtgtgtatgagagagagagagagaaggaaagagagccagagaaaagcaagattattttctctttcaacatagagagttctttgtattacttcagatttttcaattgagggaacttttatatcttatatttgatactgctccagtctttgcaccctttcgtgtaggaaggagaatctcttgtacatggaatctatcttcatttctccatgtgtaccagtcttatctgtcattttctctagcttcaagtagaattcgttgaaactgcccttctgtggacttatttgcagttttagaaagttgattttgctctttattgctttcaatagaataatctatgctatttccataatatcttcaccccttttaatttccgctcactgtcttagcaactcatctatgttcaggatgaacctagagaaaacacaagtgctgtgatcacaaatggctttgtgagggagggacacctaactaattccagacatcctgacataaagataaaagtaggagataaagacatacatattttccagcagaaagaatgcttaagcaaaagcatagagataaaagggtgtctgtttgcgaattaggggaagtttatttttacccatcatgtttggtgaataaagagaagtgaaagaaataagacaagagaaattggggccaagattataaagaaactttaatataagtcataatggaaaataaaaccatagatccaaacttaaagttaggctcttctggttgtctgaattaaggaaaaaattaagagggtctcactgagcaaaagttgggtgattctaccccacagttccctaaaacaacaaaatgcagccttccttatatacagtgagacccattcagaaattggattattatactcatatagggaagttcttccagtcacaggttgtcaaacttcaaaaggtcctttgaagtggtgctgataacatacatttctaagcaatcacactatttttcaaatctattttaaaaatcagggtcctagcagttttctgagttgctagcattctttctgtaatcagtggtttacatttcatattgatctgcttttatggtacagaattcttcacaaagtctgagaagtataatttatttagattatttttgtaatacataatgtacatatttttgaagtcgtgataatttattacattgacatgatttgtaaagataaaatcagtggaattgtgatataaccttaaattggcttttctttatgctagaaacatttgaagtattctcttctagctattttgaaacatataatcgattactggaaactatagctaccctaattatcaagcactaggtcttattatttgaagcttgattagaagccattgtttgtgcttatgtaacataagatttctaagattttacatgttgtagatgtgatacaccttagttaaaacaaaaacaaaagtgtgtagtttcaatatttttgtagatattattcattgtgagtttattgtgtagaattcatatgaaaacacattttattttagagcagttaaacaaattagaaaagcctgatgcattcagaatcaaataagccaaaataagcataagaaagataaccttgagcccatactctttcatggaaactttctaaggtataaaaataaaacaagccaatggcattatagaaaatgtgatatccaaatagaattgtttataaatagaatgttttacaaagtttccatgaggcatcagctgttctttaaccccttgcatgttgacattttccagcccactagctaaattaaggcttaggaaaaaattacctatgcattgtatttttatgtgtctgttaatctatttttatatgctctgggcatacagcatcagttccagtataaacatatcaaaagatacgccctatacacacaacacatgtatgtgggcaaacataagaaagaatataaaatgcttcttttacctctatgttgcagaaaaaagctgtaacaagacaaaagtttaacatgagtagagtgagccagcctgcttgattttctggatttgttgcagtttaagcttattgtattaatctagttaaaaatagcaccctcatacatgtgctcaaaagtgtcccattttagatgataaattccatggcaattccaagtaagaggcaagaactgatcagttatttgtgagttactatagcagtcagaggaagctagattaaaaatgcttgaaaatatttgttatctatcaagagaataccattcagttatattcagttaaaaccagatttcaggacaattggtattgaaagattgtttcatctgcccaaccagcagtatcactcttttaaaattagctatgtatgattatttttctctgcccatctatttctttttccctgttacacacacacacacacacacacacactccagttacagtttgatacacaacaatactttggtgtgtatcattacagtttagtaaatataatcagcctagaaacaaggaaaacagtcttcatttttcatataaaaacgccaatcagttcccataatcctggagcaaacaactttgttactttctcttcacaataggcacaaagagcaaacaaaaaacggtagttctggtgagatttgcttttctggccatgaatgttcaaggtggaaaatgaatacaggtgtttgtttgtaaaagcatgttaatgttggttttttttttccttttcgtacactaatttaaaaagatcgtatatacttgtacttgaggatacactaacatataccccacaatcaaaatgcactaacatttaatataactttaattattgtaatttttccaaggtgtttgatgtgtttatatagtattctcttccttggtgttttgtcttgtcctttgtacctgctgtatatgccttaggagatgaaaacatgctgattacttctttgtgatggtttgttgattacccttgaagtcaggggaaaaaaattaaatgggatgttccccaaaaaatcagtttactcttcagatgtttaggaaaaatcgtgattccaaagtcattctgaacagaaatgttctgtattttttctttttagtggctagtggtggattggagagacccctttttgcgtgtatgaatttagtgtttcggaaacattgtatacaaagagctcaccattgtatcagggaatgctggaaaattcaaacttggtgtcagaaatataaactaaaatgtcaagaacctaagatgtgcaaaacctttggcacttctgccactcccagaaaagactttattttgaaagtgcacctaaaatgagtattttataaaacacatgacacatgcagagagcacagatgttagatttaagcagtcagaagttcaaatccaacagctcctgacttactagctgtgtgcccctgaaaatatttttcagatcctgtgtcacttgtaaaatggttcaaatgagttattgatgtcaagttctcattacaatgcctggcatatagtaaggattcgataaatggggaatattctttgtggaatatttctgaatagagagactctctgccattcatattgcaatgccccctcccccaccgaccttggttgctaaaggagcttgtaatacagagaatagctagagcttgtcacccattcaagatgcttttttacaagccagacaagtcagtgattcaatactcattcatcttcaacttccacctgcagacagtgttaaactgacgggcatgtccctctcttaccctcctaccctcctattggacatactgacaggtctctaaaatggtttctattttctcaaacatctgcttttcctataatcattataattatttttgctgggcagatttggatgtgaccttggctttgggaaagcagatttcaaaatgttcatagagaaaaaataggtatgatcccatggcagagagattcttaaaaaaaaaagagatataattctgattttaaaaatcacaattccaatgagaacgaattagggacagaaggattagtcatcatagctactagataaattctgaaaaactttttagaagataatccaagcacagactgacctcatatttttaaaaaagataaatttgagagggtggaggtgaaatagagtcagaggaaaatccagtaaggaccaaaaagttccaaaggagaataataagattttaaaagcattgcctagaagctggtgtcagcctcatatatgacagagaaaaggcagagccattaaaactgaattttattttcagcacttttagcaaagattaataaataaataaaatggaaggcacagagataaatttaaaatgcctgagaggaagatatagtaacagctgatcattaattcaggtagtttcctagaatgctcataataattgtaatagtaatagtattaaacacattgggtttggtatctgccaggtacttttctaagcgttttacatgtttaatatttattacaacctcatgagataggtttttggtattatcaccagttacatgaagaattaaagtacagagaagttaaaacaaccacagtttactcaaagtcatggtgtttgaatgtgtcacagctgagatagtatggggctctaagtactacaaacagaaaattgaatttcccatcttttgtttattttgaatgggataaaaacttttccccagcagacttttcccaaatcgggtcttcttggcacttcacaaagatgataagacgaccatagattgccttatatcaaacaaggaattccttaaagcagaagatgagcctagcaccctcaggaacaggtgccctcttaaagaaggtgaacaggatcatgggtaggcagtgaggaagaaggaagatagtgtgtccggcaaaatatccttgctatttttatcagtgagcattaaatttagttttctggaatttattagaaggaaagaatacaaataaagctgaaggatttgataatttcacataatgatttttttaggacaagagttactcgtttttcaaaatggaattgttatttctaataaatagaaacaactctaagaggctgggccctttaattttatattttcaagttttgtatgtttacattctcttttatgataataattctaccagtttaaaatttttatgtctaaatgtaatactcattaacagctttttatcattctttagttatttatgtgaataatcacttaattggctggattacatcaatatattatccttgtacctttgtattgaattctcttatgtattatatttctaatgttttgaaattttgactgatttccagacaatatatgggtttatctccttaaattcttcaaatagggcatggctgttgttcatgaactcatttctttccctccccaatagccctcaataatcccactcaaataaatataaatagatgacacacactgcttgtcatacttctgtcattctgaaaccctccacaattatgctccaagactggatgtactgatttctagatgagtataaaaagtgagcttctggcagtgtgctgattcctcaaagagttaaaaacagaactatcattcgacccaataatttcattactgggtacatatccaaaggaatataaatcattctactataaaactcatgcatgtgtatcttcattgcagcagtattcacaatacaaagacatggaataatctgtgacatggaataaaagtgatgaaataatctgtataataaacccttatgacatgagtttacctatattacaaacctgcacatgtaccccaaacctaaaataaaagttttaaaaagttagcttttgaacatagatgtaaaaatcttcaataaaatattggcaaatcaaatttcacaatatatagaaataagtataaatcatgaccaagtgggatgtatttcagatatgcaaagctggttcaacaatttaaaatccactaatgtaccccatcacatcaacaggctcaagaaggaaaaaaatcacataatcatatcagtagctgcataaaacacacttgatgaaatctaacaccaattcacaataaaaactctaggtaaactagtaatagagaggaactttctcaactcaataaagaatatccacaaaaatcctatagctaacatcatatacaactcaaaacatatgcatgttcagggcaacactcagcaacacctagcagggagtatatttgctgtgtgccagaaaactgggaagagatttcacggttggaccatctgggaagatacagagttcagccatagttatagtagagacaccttggtgaactccctgggaatatacttgaggtcccagaagagccatgtttatgagaaagtacagttttctatatgtaaatttaaagccaaaatttctcatctttttttttttttctttttgagatggatggagtcttggtctgttgtccaggctggagtgcagtggtgcaatcttggcacgctgcaacctgcacctctcaggttcaagcaattctcccacctcagcttcctgagtagctgggattacaggtgcctcccaccatgccaggctaatttttgtatttttagtagagacggggtttcaccatgttggccaggctggtcttgaactcctgatctcaggtgatccacccaccttggcctctcaaattgctgggattacagttgtgagccaccacacctagcctctcatctttagtaaagtctaaaaccaagacatgacaggtcaagttgactcactggcaatctaactgccagccagaaaaaaaacttgacaataattataggaagatgacataatacagaacatccataatgtcccacctacaatatccaacaatcaattaaaagtactatatatgtgcaaagaagcagcaaacagtaattaataatcaaaagacaaaatggtcaatagaaacaggcttagtgatgatcccattactggctgtgtgactttggaaagctctgagcttcaagtttcaacatagaaaatacagttaaacgagactaaatcctatagatttgctgtaagaattaaattcattaattgtatgtggaagtgaattatcatgatgaagtttcctattatatgattgccactaaggaaccacacaggaagcaataaaaaggaagaacagattctggtctgacagcaacttattttaaaaataactcagttttagttgtcatttattttaagagagacaatatagtttattaattaagggtcttatagtcagaaagaactagctgtgagcagatttctgaatctctctgaccatcacttttctcaaatataattgagaattataatggtacctgtcttgagggtgttgagagactactagagagtagaagacatacaagaggttagcatagttcctgaataactgaagccagcaatgtgtagactgctaacagaaagttcaagtgttaagaatctagactgatagaattataatgttccaatgacaagcagtagtaaaccccaatgaaattctgaaagtagatgacatatttaaaaatgtacaccgacaagcttttctgactaggcaataggagtagttgaaataactggagatggtgacattcgaaaatgaagaatacaggatgagaaacatttgggaaacttttaggttgaagagggatcagatttattctgtgctgctctaaacacaggtctgggactggtgcaaaacactgtggggaggcagctttcatcttagtattaggaaggacttttaaacaattagaggaatccagtgataacatggtttgatttaagaagtagtaattgccctgtctccagaaacttttaagcagatgttgattgattcctgctcagggtcattatggaggaaattcctgcactgggtaggatgttggactaggtggcccctatgtcccttccagcatataaatatgtggatattccatatatggactgttttttcagttgtactcagtagctttttctccatgtggattaaatggatatcagttcctcattattttgaggtgagtcaaaggaaaatagcatgtacaacagcacagcagcccaaacagtttatcatgcatcttaaaaacacaagtcagtgaagtaggcagtttcaaaggggaccatatcattgccagagtgctcccaagaagccagctgctcctggaaaaatacattacatttcccagtttggcacctgagccttgcgattgctgtccaaggaggtgaagaagaatgggtttataggcagccataaataactaagacactgaaattctgaaaatgggtcaatttcttccctatgattcaagacccaaatgggagtgagctactgttccagcctgaaaggaagagagctttaactacccattttcgaaaatcaaatgaaagtaactaagaactctattattcaatcaagtgttctgcaaaattcttcacagtaaatcttgagtaggtttttatcttaaagatatggagaggaagaaatagagatgctttgcgtgggatttccaggaatgtcagtcagcaagagggaccatgcaggctatttagccatgtctgtatagtctgatgttacatttatgttcctcccaaggacaatgcaacatatgtgtggaacttgtttggaaacctgctcttttggacaaagaaatatccatgactcagccccctaaaactcttccagaattttgacattctaaaaatgcatcttgtcctccatgtggaattttgtccttcctaaattcattcactaagtaatctttcattgtgcctactatattctaggtacttttattaagtgtttagtattcaaaaataaataagaccccatccctggcctttacagatgcaaaaagcagtgctcatctccagtggtcttttttttaagtcctatgattaaattttaaaaaaatatatgacatacatacatacaacaaaaagtttgttaaagataacacagagaccaatatatttttttttttgaaatggagtctggctctgtcacccaggctggagtgtaatgatgggatctcagcttactgcaacttctgcctcctgggttcaagtgattctcctgcctcaggcttctgagtgactgggattacaggcacacaccaccatgcctggctaatttttgtatttttagtatagacagagtttcaccatgttggttagactggtctcaaactcctgacctcgtgatccacctgcctcagcctcccaaagtgctgggattacaggcgcgagccaccgtacccggccaagaccaatatgttttaaaataactcacagcaggataatgttttcctccgtcttctcaaggtagattggagcatctattccaaagagccattcttcctccccttctgtgcccattttcagtccttagatactattttatagaccttctgaatgctatatcaaaataaagataggctgaactttctccttgcttcaggaaaataactcagtcagcccagccacgcacccgatattccttcaaaatccagataacagaatttaagatttttaaattcttaagctatcacctccaaactatctttgttataatctgcaggtgcttggagaaaattattacttaatgcagaagatacatgtaaacagcaaagaaagaaatgattagtggcacatattccattttctttaagaacatggtttttaaacatcctatttccgtatagagaatttgaaaatgctacatattgcctgacctctccatcagaaattgagtcatttgatatggcaagatcctgtatgactctgcatattttctcactgtacctgtatgtctccagattattctgatgtttgttcatctggtttaggagctatttcttttcttttctttctttcttttcttttcttttttttttttttgagatggagtcttgctctgttgcccaggctggaatgcagtggtgcaatctcagctcactgcaacctccacctcccaggttcaagtgattctcctgcctcagcctcccaagtatctgggattacaggcgcccaataccatgcctggctaattttggtatttttagtagagtcggggtttcaccatgttggccaggctggtttcgaactcctgacctcagatgatccaccagccttggcctcccaaagtgctgggattacaggtgtgagccacggtgcctggccaggagccatttcttaaggcagtgtttattaaccctgggtgcaagttagaatgacatgggaactattagaaattgtgacatctaggctgcacctcaaactcctttgtgtactgaacattgctgtatccttgctacaatggaactgagtattatgacagggaccttctggcatgtaaggccaaagatacttattatctggccttttacagaaaatttgttgatcactgatcaagaaaccataatagtgaatcaaaccaaggatgaatagctttctaaaactacatatgtgtctctaatttaccaaatcacgcactccacaattcataacttatggtgggcaattgtgggggggcagcaggaaaaactgtcttcaccatttttcactatttggtctctataagaaatcattacctgcccccttctgccctttaaaaatcagtaacttgcaaaggaattgagaaattttaaaagtctataaggtcaaacacagctctctttcattgaaagggattaaagagcataaagttacagttaagaggagtaaaattagggatctattgcacaggatggtaaccattgttaataataatgcaatgtatatttcaaaattaatgaaatagtagatattaaagatcattcaaaaagataagtaggtgggctgatggatatattaattagatttatttaatcttttgataatgtatacatatatcaaaatatcacattgtaccccatagatgtatacagctatttttagtcaattaaacatttaataaaaattttaagagctagactgccctatagtactgagtatttgaaataatcttttgattgcctgtttagcatcactgttatctgaagctgttctttgctttttgaatgtgctaagctcttttcatacattggttaaatattattgtaagaaatataatttttgagtaggtattaaaactggaatcccttctcgcaattataaggggaaaatccatagcaacaaaatagcctaagtctttgtctgttaattaaatgtaagttaatggctgtttaggaaaacaaaaaatgccacctgggatagaaaatttaattagctccaaaagaacataagtcaaagacttctgcattagttttctgttgctgctgtcacaaattaccacgaagttagtggcttaaaacaacacaaaatttattaccgcatggttctgcagtcagagtctgacatgggtcttactaggctcaactcagggtgttgacagggcggcatttccttctggaagctatagggcaggacctgcttccttgccttttcagcttctagaaacagtctgcatggcttgattcacagaccccttcctccaccttcaaagagctcctcatgtgacaatcactgtgaccttcctttctgactcttttctacttttacagacccttatgattatgttaggcttgcccagagaatccaggataatctattttaagatcagctgacttgccaccttcaatccatttgcaaccttaatttccgtttgccatgtagtatgtatcctacatatgttacgatgtgtagtatactcacaggtttcagggattaggatataagcatctttgagggccattattctgacatccacaagtccaattgtagtattggtctgggagggaatgagtgggtgtaccccatctgaagaccattctcctttttctaagaaattccccattgtctgaatctgggtaaaaaccagaaccccagttccctttctagaaacgccactcctctcacccttgacagctagagcacaagccaaccagctgcacccaccctggactttgaatcttggcagagcactttaattttatggggataaacattattcatggtgacagtggtaatagttgctgtgagaattgtgaggtgtgtggcaaaggcagcagcaccaggactttagatgtgatgggctttagcatttaatggcggcagtaccagaagtgtggtaccaccaaaagtcacctaacgagaatgttctcggggtgactgtgcccatgcttcttccaccttgggcaatactcatatttcttgcctacattgattgtcagtcatttttggcacctggttctctaagctgtgaactacccatatccctgtaattcatttcttttcttcttaaattgaccataatcaggttctgtggattgtaaccaagaatctttattgtaaccaagaatattcttttgagtaagatccttcaggaaatttttattttcaatggcttgctctctgtaagaaagcctgatttataaattaggaaacttggagtaaagaacaagttgtcagaatactggcacagcttcattggtcaagtaggagctaagacagctgataatctggtaggaatgccctttatgcagatgacaggggaatcaatatagaagtcttagaacaatggtagaactaggctttggttgggcaatcttgataactgagaaggtaaatttagaatgtgaaatacagcagcagaagactaggggagaaagattactttttttaaaaaaattatactttaagttctgggatacatgtgcagaacatgcagatttgttacataggtgtacatatgccatggtggtttgctgcacccatcaacccttcatctacattaggtatttctcctaatgctatccctcccctagccccccatcccccgacaggcccaggtgtgtgatgttcccctccctgtatccatgtgttctcattgttcaactcccacttatgagtgagaacatgcagtgtttggttttctgttcctgggttagtttgctgagaatgatggtttccagcttcatccatgtccctgcaaaggacatgaactcatttttttttggtatggctgcatagtattccacagtgtatatgtgccacattttctttatccagtctatcattgatgggcatttgggttggttccaagtctttgctgttgtgaacagtgccgtagtaaacatatgtgtgcatgtgtctttatagtagagtgatttatattcctttgggtatatacccagtaatgggattgctgggtcaaatggtatttctggttctagatccttgaggaatcaccacactgtcttccacaatggttgaactaatttacactcccaccaacagtgtaaaagtgttcctgtttctccacatcctctctagcatctgttgtttcctgactttttaatgatcgccattctaactggcattagatgatatctcattgtggttttgatttgcatttctctattgaccagtgatgatgagctttttttcatatgattgttggccgcataaatgtcttcttttgagaagtgtctgttcataacctttgcccactttttgaggtggttggttgtttttttcttgtaaatttgttaatattccttgtagattatgtatattagccctttgtcagatgagtaggttgcaaaaactttctcccattctgtaggttgcctgttcactctgatgctagtttcttttgctgtgcagaagctctttagtttaattagatcccatttgtcagttttggcttttgttgccattgcttttggtgttttagtcatgaagtctttgcccatgcctatgtcttgaacggtattgtctagttattatctcaccctagataatcaagtcagtcataggaaagaagctgcatttggaagcacaataagcagaattcagctacttagagaaggtggcaagcaggcttgagatcacaacattgctccagtgccaaaagcaattcaggggtttcaaggaaaccaggggaccagacccatctcattgcctgagccagcagattggaaatgaagaagtttgggggcacagaagaatcactcacagtcaaatagatgctgagtagatgccagatatattaattctactccattggtaaactgatgtttgtactctaatttttgcaatcactttgaaattgagctaagttgagccccaggtagaaggagtcttctctttcatttggccagggtttgagatgaaagtgactgatgtgcaccttgcttaatcaatatcttgatagtattctcatatgaagataatagaagctgggcaaaatgttctcagtagactaggaaacaaatccttttagcatgcaagttttgtcctctttttggaacaccatgccaggcctgtcttagtacttgaatactcttggattcaagcaggttgaaggcattctgaaaatattctgaatctcacacacagagttaatgtcagatttagacaacaacaagataaaatgtattgatattaggagggcaacaaaaaaggacacttagataactgcagcagagaagctattagtttagtaaacaaattggctttcagtggtgattacgtcatagctcaacttgagtctgatatagtcgcatggataataacatcgtagcagaagattcgtgtaacactggtgcataatttactagatcttgacagtgactagagacccacaaaactctcattcctcccatgtattcctcaacctctacaaagcaatgttatttttttctgaccccgtgggattctctgccttctttagcatgggttttccctggttgtgttttcaggatactctgaaggacgcgaacaatcgcattataacagaaaggacacaatcttcattcatgttcccattaggttaaatgcacctcaattatgtttcttgtcctcctgttgtttgttgttattacccttcctgtatttgttcccagacaccttaaaaacatgagtcagaatcactttttaggtgttgggaaggtgggtaagaggaaggagagttggtaagagggcacggagaattctgccttgtttcctgtgctgcattgatcagacttaaatgttatcccaggatttgtgcgttaaatctgtggcagttgtattttcatttgtgtatttaattgcttcatgcatatgcataatctccgggaacactatattgtgataactcactttgaatgtcaaaggactttttaaaagccctcagtatcccacccttttgcttaagatgattccttggaagtagatttattatttatacaatgaaaaaaagatcaaaaaattattatttactaggaatatatatgtgtcttctcctagtgggtatgagtgagtgtgtgtgtgcatgtgcaaacatacacagtgtttacagtgtattagccaaccatgcagcaacagccctaatgatatggaattttacaaggaaggttatttaatctagatttttaccattatcttgactgggagcagcaaacttttcctgtaaaggccaggtggtaaatatttttgctttgtggaccacatgctgtctgtggcatgtagtataaaagaagtcatagacaataggtaaatgaatgtatgtgtgtatgttacaataaaactttttttatttttttttctttatttattttttttgcaaacacaggtgcttggccacgtttggaccacaacctctagtttcccaactgcagagcttgattcttatactcagttaggggtgtgactctccaggcatatacatgtaataattggcagaagttttctttaaaatgaagctttattaaaaaaacaacaataagaaaaggaaaagcaaaataacaggtggttttcaattcactgaaaccatcctctatgataagaatcacacatatttattaaaaatacatgacaaggtacatagagctgatttcagaatctgtttccttctttaagtgactggagccagctcttgagctgggtgataaagagtagctctgggacattcaagctgtgtgacccacatgctttggagagcacagtttctggcatcaagataattctcattgaccacagatgcttcttaatatttgccgatttattgctgaaacaagtgcagcagattaacattataggactgtggtctttgggaatactctcgtctctctattggatcagtgtttattttcagtgtttatttgtattctgaaggtgagttggatggatatagcaactttagttggcaaatctacttttttcttgaaaacagaattgaaaataaaatcctgttatacagaaacattacataccatgtctaagagtattaaacacttcccaaaccacactctctcagacacaagtgggagcttgggaagctaattttagttactgaatgtccagtatgtgttatatctcctttcctaaggacccctcaagaagagagaagaccatctaagccttactaatcaaaggatgacccatggaccagcagcatctacagcatcaggtagcctattagaaatgacaaatctgaacaggcttctcaaggttattcatgtgctcattaaaacttaagaggcactggtctaaataatgtatatttccagtcatcttacatcagttgtatatatggcatggtataaataataactgaatgaagaaaaagatgaatgaatgaatatttaatgattaaatggactaatgcttcaatggatatagatgattaaatgagtgaatgaataaataatttttcctgaaatatgtaatcaagtttataaagtgtcttgatagttttatgaagatgaaatgaagtgagttatgcgaaacattagtaaactataaagacttacacaaatgtgcagtgccacattaatagtacagatcatctcatgacacattagtaataacacaaagaagccagcaataaatttgcagagagatgcttcaatacttgtattcatttatttcgtgggtagcttaaaattcttagcctttattggtaagaagcatgggaaagtgttcttgaaggacattggttggcgactacacaagttattgtgtgtaagaacacttccaactattgttccttctgtgtgaattgaagaatgttttcctgtgagcacactctttctctcacacacacaccccacacatacacacactccaacaaatctacgcaactgtcagtctctccttcatcttggtgtgtagaaacatggtatttccaccttggtgtacaacagaaaaatcttggcttaacagtgtaatggattgaaaaatttcagtttgaacagatgacattttcagtcctttgggatgaaaaacacacattgttcagttctgaaataccgtaatcttccaaaacagattgttccttctgatatgagtggcataaaggctgatcctaggcaaagtttagttcagagatatagataaaactgcattaactctatattaaagatacacaactaatttttataggtttggggacccatagactaagggacagacagagtggcaaataattaactgacttacctagcagtgaagaagaactaggacattccaaaacttaccttgattgcacacatcacatgtataatagggagcatacattcaaggtgtttgttttaacttcagcacttgtttagattttatacagactaataaaggaccaaaaacagttcatctctaatacattaacagttgactgaatagggaaacaagattcagaatgaagtgaaataattcatatgaacaagttttccagataatttatatgcagaagaaaattcagtagtttagaagcagtaactcaaaacaaggctaaatattgataagggccaagaatggagccaaaggctatatttcagtttgaaactaaactcacatatctaaaatatgaatatatttatatataacacacattaaagaacacattttaaatgatggttttgtttttatatttctgggaaaatatttgattttttaagcacaaatttattaggttaagtttaacaaattgtttagccttttaaaattacattaagtgccataaaaattttaaactagaccaaattaataaaccattcaagctagaagacagaaaagtcataaatatgataagcaatgttagacatcaaaattattcaaagctaaaaataagtgatattttgtccctatcaacaaaatttaaaattgatccttgatcaatgctaaagatatgaaaaagctgaaaaagttattgaatgtcattgacactgtagattgatacaaccctttaaattgcatttcaaaaaataacaacctgtttctggaagttctcctaagataagaaaaaaattatagaaagtagcttaatacaacattatatgtagttagagtcagaagaagcaaaattcctcacattagaatcacataaatctaatataatattgcaaaactattgaaataattataatgtaccccgcatgacaatatgaaaatgcttaaacgttaaaaagatttaaaaataaagtagaatcaatgaagattaaatattcagaataagtacaacaaaaaatgtgcaaaacccatgtgagaaaatattttaaacactattgaagaacgtaagagtagacttaaacaaatgcaaaagcatttgcttgggaaaattcaacattacaagtttttgtaattacattgcaaacatttgcttgggaaaattcaacatattacaggtatgtcagaacttcctaaattaatttataaatcctataaatttagcaagttatgtatagagttagataagctgaaaatagtttatttagattaaaaaatgcaaaaatatccaggaaaatatacacaaaattgggaaaaaatgactaggtgaattagctacaatcagatgtaaagttgccttaattaaaaattgtggtatcagtacatgaacaggcaaatagaccagtgggaaagaacagaaagttcagaaacagactgaatacatatggaaatttaataaatgataaaggtagcctctcaaatctctgtggtgaagaaagtctttttttttttaattgtgctggcgtaagtggataaccattttgattgaattaataaaactgcatttatgtttcataccgtatataagaataaaacaaggatataaatgtaaaaaacaaaacaaaactgtttaatttatatatgataatatggatgagttccttcttgaccttggtataaaagaagactttctgtgaatcaaaatcaaaatgcagtaaaagaaagattgataaatttccctacataaaaatgaaaaatttgcatgccaaaaaccactgaaagcaaagtcaaaaaagacaatttgtaaacagggagaaaataattgcaacatatatctaagacaaatggctaatattctttgtattaaaaattctgaaaaattgaggaacaaatattttaggggcaaatgacctgatataggaaaaagatatgaaataacaatttcaaaaataatatttaaaatgggcatccaacattcaagagaatattaaaatttgctgataattagagaagtataagttaaaacagggatatcatttttatctattggactatctgacattaaaatagtgtcacatacaatatatgatccaataatcacgctccttggtattttcccaaaggagatgaaaacatgttcacacaaaatcctatacacaatgtgtgtagcaacttggaagtaatcaagatatccttcagtaggtgaatggataaactgtggtgcaccaagacaagggaataatattcagtgctaaaaactctcattaatgcatttatggaggaaacataaatgcatattactaagtggaagaagccaatcttcaaaggctatccactgtatgatcccaactacgtgacattcttgaaaggacaaaactataaagagagtaaaaatatcagtggttgacaggggttttggggagggaaggatgaataggcagagaacaggggatgtttagggcagtgaaacttctgtgtcataccataatggtggatacatacccttgtatgtttgtccaaacccatatacaaaactaaaagtgaaccctaatgtcaactacgggctttgggtgataatgatgtattaatgtaggttcatcagttgtaacaaatgtatcactagggtgggggatgatgatcaagggagaggctattcgtctataaggcagaggttatatggggcaggggttcccaacccctgggccacagacaggtctagtctgtgacctgttaggaactgggctgcacagcaggaagtgagcagtgggccagcaagcattatcgcctgagctccacctcctatcggttcctcggcagcaatagattctcatagaaatgcaaactttattgtgaactgcacatgcgggggatctaagttacatgctccttacaagaatctaatgcctgacgatctgaaggtggaacagttttatccctaaaccgtccacccccgtggaaaaattgccttccaggaaactggtccctggtgccaaaaaggttggggaccactgatacaggaaatttctgaactgtctgtccaattttgctgtgaacccataactgctctgtgagagaggctatgaggaaattggcattgccatgctttgctgacaaatatgcaactttgcacaatcactctgaaagcaaatttagcactatctaataaaactacatatgcacttgtcttttgactcaacaattccgattctggggtatatcttcctaccctgaagatacacctttaggaaccgaccctgaaaaatgcatatatccaaggttattccttgcagcattgtttgattgcaaaatattgcaaaaacctatatgtccatacccagaaaaatgattgaataaattacagtatatccacttaatcaagggcaatgaagctatttaaaaaaatgtgcagaatctctgtggactaatggggggaatgatttccaaatagactgataaggaaaaaatacataaactattaccttgcatatgctactgtttttgtaacgaagaaaatcgaaaaaactacacgtgaatctactcatttacacaacagagaatatagaaaaaataaaccagaaattaaaaagttggtacataaagaggggtcattgaaagtaatagaaaaaagtgataagtgagtatggggtagtagagaggaggaggtagtagcacaactttgtgtgtattcttttgtagagctctggctcttagaattacagtaatatgtcacatatctcccaattatgtatttattaaaatcaaccacaatatagagcaagaacctagaaatgcaataaaacagtaccaaatgagtctgactatattacaaatacagtccacactggggaaatggagaagacaataactgacataaataactttagaaacaatgttttgactggattctgtaagtcaagagataaacagatctataaacaaatgctctatatttctcacagaagtgtgggttagcatttctataacaactttaagtgtacatcatagtcaaataacaaatatgcacacataacacatctgcacaaacataaatatatgtgcatagatacacatatgtacacacaaatacagatgtgtttgtgtgtgtgtgtgcatgtgtgggttggcatacacacatacatttcatagctctgctgagaggcctgggagcaatgaaactccaggaacaatgagcacaactagcatccagattttggtccctaaacaccattcttctgtcaaaggaaccagggctcaatgcagaagtggttgattccagggattgggccaggaaagtacaagatgagctggaacaacttgcaatgccataataagggagtttttggaaaatgatgagacatttgcaaaggacataggagccaacttgaagggaattctaatggccaaatatggaacaacaatctgagcaacaaaacaactaatagtattggaccataagccacaggacagaataaatatccatgagcccatactaatctgaataactgaacaagtaaagaaattgcagaaaggagtctgttgtttgtcacggaaaaattctattgatacatataaaaagaggaaaagcaaaaaattaccactggacaaacaccatagttattgttgcagacaagaccaatctacgaatcctaaaattgttgagcacatttttgagaactgaatatttacatggcctcaaagtatcttcctcagattatttattatcttgcctaaggtacaacgggaaaatagtaactttatggtggatgaacccagcagataacaccttaacgaagagatcaggttaacatcacccagtaagacatagtatcacaaatcccatgatatgatgcactgagaaggacacaactttacttctgccaaaagtgtatagccttattccaagcatgaaaagcttcagacaactcataattagagacattctacaaaataaatgcccagtagtcgtcaagtgtgtcaggatgacaaaagacaagaaaagatgaagcactgttacagctggaagtaatgaaggagccgtatgatgtgggattctgagttagagtattgtactgatagtattacacttggttttgatcattttaatatgattatgtaagaagctcaaattaggggatgctgagtgaagggttatgggaagatttggtattaattttacaacttttctaaaagtctgaaattagatcatagtcaaaagttaaaaatgaatccatactatgatttatcatatctacagctaactaaataattggtgtttaacatttggataaaaattttaaaagaacatagaagagtcaaaacaggtattagaatgacggatattcaaaaaatacacataaaaacatacacatgtacatacatgtgtgtgtgtgtgtgtgtgtatctgtggttctggaaatggctaggtcatgttaatcactgctactaatattttttttggtaaaggataggaacatctgaaggttaaaacccagtgaggattttggaaatgagagtttgtaattcacagaatcacagtatcagagacttcaagtttgtcaggaaccttagaacagctttgcctgatataataagattttacatgaataattaaacactaaccatttgccctggatctcctttaatctcccatctgctgccctcattttaagaaccatctgactcactctctaccttcattttctgaaatgtgttttatgcactctttatctaaaccatctctctaagatgcttctcattcttctttcagcttcttccaacctactgttgtcatcagagagcagctcactttcaacttagtactaggttaacacctaaaatctatttttggcctagaactaaaaatagattttaggtgtcaacttagtactatgtgcatttttatggagaatcctctgttagcctcaggtgatcgctagtggtggaatggcagttgctgtaatatttggttgatgtaaatttctgaggggagagctaattattgcatattagccccaagagcacatacctccataataaaagacatatatttgctttttattggaaatctaatttttcggcagagagaggagcaatggaatgatattttctttagaaaaagtgaagcctgaggcattaaagttcatagtttataaaatcagaatttttttttttttggggcagagttttgctcttatctcctaggctggagtgcagtggtacgatctcagctcactgcaacctccgcctcctgggttcaagtgattctcctgcttcagcctcctgagtagctgggattaatggcatgtaccaccacgcctggctaattttgtatttttagtagagacccagtttcaccatgttggcctgggtggtctcgaactcctgacctcaagtgatctgcctgcctcggactcccaaagtgctgggattataggcatgagccactgtgtccagccctaaaatcagaaaaatttctaagaaagcaaaacaaaacatcaatttctatttgcttcctcagaagtagccagtgcttttattttatcctggtaaaaagagttaagcatatttaagtgaaagaggagagtgggttcttatagctccttcacccacaccacacatcccacccactctcctccccaaatgcttaggtaatgctgcgtgtgtaagtttgataagttgtatctatttctgtagatagttctgggccattttatattagatgttgctgacacttggctacctagcttgtttgagaattatttcactgtctgggataaacagaaagaaggcctgatcctctgttgcctatgatttgtgtcattaaatatcagtgcttctgttcgttgccaaaccatattcccaagatggcatggcattcctttctttggtcaacattcaaaccttaccagcttctttgacattcctgtgctacagtaaaagtattcttgcctcaggcctttttcacttgccatttcttctgccagaaatgatcagcttgctcttcctataaccagtccatttctcatgtttcaagtttagtacaaatattatttattcagacaggctctctttacatgacactctaaagtagcccctccctccactgcatcattagaagtggttttctattacaaaacgtatgtttttttcaaggtgcttatcacattccagaattacctatttactttttagtttttggggttagtctccccatgaaaaagtaagcttcataggatggggatcatgtctgttttctctgtgcaaacagcaacactgaagttgaaactattaccattttacagttgagatttacaattctacagttgagaaaaatgttttagaggctagaggctgtgcccagattatacagctagtgactggtggagccagaactcaaacacaagcagagagaatggagcccttggccactttattaagctttaaggtttaaataaaattaaggacataaatactgacagaacgtgatacacagcacgtaataaatgactgtggttattagtttgatctcgtcttcaaaatcacccaaggaaacaaaagtatacttcattgccatttaacaaatgaaagaacagttttcattcaaagaggttaagagataagcccaagaaagtggtgccgttttggtgaccaactcatcctgatttgcttagaattttccaggttttagcactgaaaatttttttccaggaaattttaatctctggggtctcagtccattttgactactgtattaaaatacctttgactgagaaattttaataccagaaagtattgctcacaattctggaagctgggaag
